(19) United States
(12) Patent Application Publication
(10) Pub. No.: US 2025/0283107 A1
(43) Pub. Date: Sep. 11, 2025

(54) INSECTICIDAL PROTEINS AND METHODS FOR THEIR USE

(71) Applicants: PIONEER HI-BRED INTERNATIONAL, INC., JOHNSTON, IA (US); CORTEVA AGRISCIENCE LLC, INDIANAPOLIS, IN (US)

(72) Inventors: JENNIFER KARA BARRY, AMES, IA (US); RYAN MICHAEL GERBER, APEX, NC (US); LU LIU, PALO ALTO, CA (US); AMY LUM, REDWOOD CITY, CA (US); ERIC SCHEPERS, PORT DEPOSIT, MD (US); NASSER YALPANI, KELOWNA (CA); GENHAI ZHU, San Jose, CA (US)

(73) Assignees: PIONEER HI-BRED INTERNATIONAL, INC., JOHNSTON, IA (US); CORTEVA AGRISCIENCE LLC, INDIANAPOLIS, IA (US)

(21) Appl. No.: 19/028,027

(22) Filed: Jan. 17, 2025

Related U.S. Application Data
(63) Continuation of application No. 16/952,193, filed on Nov. 19, 2020, now Pat. No. 12,031,142.
Application No. 16/952,193 is a continuation of application No. 16/809,931, filed on Mar. 5, 2020, now Pat. No. 11,162,112.
Application No. 16/809,931 is a continuation of application No. 16/148,668, filed on Oct. 1, 2018, now Pat. No. 10,619,167.
Application No. 16/148,668 is a continuation of application No. 15/116,740, filed on Aug. 4, 2016, now Pat. No. 10,227,608.
(60) Provisional application No. 61/937,295, filed on Feb. 7, 2014.
(60) Provisional application No. 62/051,720, filed on Sep. 17, 2014.

(51) Int. Cl. C12N 15/82; A01N 37/18; A01N 37/46; A01N 63/10; A01N 63/50; A01N 65/04; C07K 14/415

(52) U.S. Cl. CPC C12N 15/8286; A01N 37/18; A01N 37/46; A01N 63/10; A01N 63/50; A01N 65/04; C07K 14/415; Y02A 40/146

(57) ABSTRACT

Compositions and methods for controlling pests are provided. The methods involve transforming organisms with a nucleic acid sequence encoding an insecticidal protein. In particular, the nucleic acid sequences are useful for preparing plants and microorganisms that possess insecticidal activity. Thus, transformed bacteria, plants, plant cells, plant tissues and seeds are provided. Compositions are insecticidal nucleic acids and proteins of bacterial species. The sequences find use in the construction of expression vectors for subsequent transformation into organisms of interest including plants, as probes for the isolation of other homologous (or partially homologous) genes. The pesticidal proteins find use in controlling, inhibiting growth or killing Lepidopteran, Coleopteran, Dipteran, fungal, Hemipteran and nematode pest populations and for producing compositions with insecticidal activity.

### CROSS REFERENCE

[0001] This application is continuation of U.S. Ser. No. 17/488,611, filed on Sep. 29, 2021, which is a Divisional of U.S. Ser. No. 16/809,931, filed on Mar. 5, 2020, which is a continuation of U.S. Ser. No. 16/148,668, filed on Oct. 10, 2018, which is a continuation of U.S. Ser. No. 15/116,740, filed on Aug. 4, 2016, which is a 371 (National Stage) of PCT/US15/14824 filed Feb. 6, 2015, which claims the benefit of U.S. Provisional Application No. 61/937,295 filed Feb. 7, 2014, and U.S. Provisional Application No. 62/051,720 filed Sep. 17, 2014, which are incorporated herein by reference in their entirety.

### REFERENCE TO SEQUENCE LISTING SUBMITTED ELECTRONICALLY

[0002] The official copy of the sequence listing is submitted electronically via EFS-Web as an ASCII formatted sequence listing with a file named “6054USPCN_Sequence_Listing” created on Sep. 19, 2018, and having a size of 3,706 kilobytes and is filed concurrently with the specification. The sequence listing contained in this ASCII formatted document is part of the specification and is herein incorporated by reference in its entirety.

### FIELD

[0003] This disclosure relates to the field of molecular biology. Provided are novel genes that encode pesticidal proteins. These pesticidal proteins and the nuchcleic acid sequences that encode them are useful in preparing pesticidal formulations and in the production of transgenic pest-resistant plants.

### BACKGROUND

[0004] Biological control of insect pests of agricultural significance using a microbial agent, such as fungi, bacteria or another species of insect affords an environmentally friendly and commercially attractive alternative to synthetic chemical pesticides. Generally speaking, the use of biopesticides presents a lower risk of pollution and environmental hazards and biopesticides provide greater target specificity than is characteristic of traditional broad-spectrum chemical insecticides. In addition, biopesticides often cost less to produce and thus improve economic yield for a wide variety of crops.

[0005] Certain species of microorganisms of the genus Bacillus are known to possess pesticidal activity against a range of insect pests including Lepidoptera, Diptera, Coleoptera, Hemiptera and others. Bacillus thuringiensis (Bt) and Bacillus popilliae are among the most successful biocontrol agents discovered to date. Insect pathogenicity has also been attributed to strains of B. larvae, B. lentimorbus, B. sphaericus and B. cereus. Microbial insecticides, particularly those obtained from Bacillus strains, have played an important role in agriculture as alternatives to chemical pest control.

[0006] Crop plants have been developed with enhanced insect resistance by genetically engineering crop plants to produce pesticidal proteins from Bacillus. For example, corn and cotton plants have been genetically engineered to produce pesticidal proteins isolated from strains of Bt. These genetically engineered crops are now widely used in agriculture and have provided the farmer with an environmentally friendly alternative to traditional insect-control methods. While they have proven to be very successful commercially, these genetically engineered, insect-resistant crop plants provide resistance to only a narrow range of the economically important insect pests. In some cases, insects can develop resistance to different insecticidal compounds, which raises the need to identify alternative biological control agents for pest control.

[0007] Accordingly, there remains a need for new pesticidal proteins with different ranges of insecticidal activity against insect pests, e.g., insecticidal proteins which are active against a variety of insects in the order Lepidoptera and/or the order Coleoptera including but not limited to insect pests that have developed resistance to existing insecticides.

### SUMMARY

[0008] Compositions and methods for conferring pesticidal activity to bacteria, plants, plant cells, tissues and seeds are provided. Compositions include nucleic acid molecules encoding sequences for pesticidal and insecticidal polypeptides, vectors comprising those nucleic acid molecules, and host cells comprising the vectors. Compositions also include the pesticidal polypeptide sequences and antibodies to those polypeptides. The nucleic acid sequences can be used in DNA constructs or expression cassettes for transformation and expression in organisms, including microorganisms and plants. The nucleotide or amino acid sequences may be synthetic sequences that have been designed for expression in an organism including, but not limited to, a microorganism or a plant. Compositions also comprise transformed bacteria, plants, plant cells, tissues and seeds.

[0009] In particular, isolated or recombinant nucleic acid molecules are provided encoding Pteridophyta Insecticidal Protein-83 (PtIP-83) polypeptides including amino acid substitutions, deletions, insertions, fragments thereof. Additionally, amino acid sequences corresponding to the PtIP-83 polypeptides are encompassed. Provided are isolated or recombinant nucleic acid molecules capable of encoding PtIP-83 polypeptides of SEQ ID NO: 1, SEQ ID NO: 3, SEQ ID NO: 5, SEQ ID NO: 7, SEQ ID NO: 9, SEQ ID NO: 11, SEQ ID NO: 13, SEQ ID NO: 15, SEQ ID NO: 17, SEQ ID NO: 19, SEQ ID NO: 21, SEQ ID NO: 23, SEQ ID NO: 716, SEQ ID NO: 754, SEQ ID NO: 755, SEQ ID NO: 756, SEQ ID NO: 757, SEQ ID NO: 758, SEQ ID NO: 759, SEQ ID NO: 760, SEQ ID NO: 761, SEQ ID NO: 762, SEQ ID NO: 763, SEQ ID NO: 764, SEQ ID NO: 765, SEQ ID NO: 766, SEQ ID NO: 767, SEQ ID NO: 768, and SEQ ID NO: 769, as well as amino acid substitutions, deletions, insertions, fragments thereof, and combinations thereof. Nucleic acid sequences that are complementary to a nucleic acid sequence of the embodiments or that hybridize to a sequence of the embodiments are also encompassed. Also provided are isolated or recombinant PtIP-83 polypeptides of SEQ ID NO: 1, SEQ ID NO: 3, SEQ ID NO: 5, SEQ ID NO: 7, SEQ ID NO: 9, SEQ ID NO: 11, SEQ ID NO: 13, SEQ ID NO: 15, SEQ ID NO: 17, SEQ ID NO: 19, SEQ ID NO: 21, SEQ ID NO: 23, SEQ ID NO: 716, SEQ ID NO: 754, SEQ ID NO: 755, SEQ ID NO: 756, SEQ ID NO: 757, SEQ ID NO: 758, SEQ ID NO: 759, SEQ ID NO: 760, SEQ ID NO: 761, SEQ ID NO: 762, SEQ ID NO: 763, SEQ ID NO: 764, SEQ ID NO: 765, SEQ ID NO: 766, SEQ ID NO: 767, SEQ ID NO: 768, and SEQ ID NO: 769, as well as amino acid substitutions, deletions, insertions, fragments thereof and combinations thereof.

[0010] Methods are provided for producing the polypeptides and for using those polypeptides for controlling or killing a Lepidopteran, Coleopteran, nematode, fungi, and/or Dipteran pests. The transgenic plants of the embodiments express one or more of the pesticidal sequences disclosed herein. In various embodiments, the transgenic plant further comprises one or more additional genes for insect resistance, for example, one or more additional genes for controlling Coleopteran, Lepidopteran, Hemipteran or nematode pests. It will be understood by one of skill in the art that the transgenic plant may comprise any gene imparting an agronomic trait of interest.

[0011] Methods for detecting the nucleic acids and polypeptides of the embodiments in a sample are also included. A kit for detecting the presence of a PtIP-83 polypeptide or detecting the presence of a polynucleotide encoding a PtIP-83 polypeptide in a sample is provided. The kit may be provided along with all reagents and control samples necessary for carrying out a method for detecting the intended agent, as well as instructions for use.

[0012] The compositions and methods of the embodiments are useful for the production of organisms with enhanced pest resistance or tolerance. These organisms and compositions comprising the organisms are desirable for agricultural purposes. The compositions of the embodiments are also useful for generating altered or improved proteins that have pesticidal activity or for detecting the presence of PtIP-83 polypeptides.

### BRIEF DESCRIPTION OF THE FIGURES

[0013] FIG. 1 the phylogeny of ferns based on the classification for extant ferns by A. R. Smith et al, TAXON, 55:705-731 (2006).

[0014] FIG. 2a-2j shows an alignment of the amino acid sequences of PtIP-83Aa (SEQ ID NO: 1), PtIP-83Ca (SEQ ID NO: 5), PtIP-83Cb (SEQ ID NO: 7), PtIP-83Cc (SEQ ID NO: 9), PtIP-83Cd (SEQ ID NO: 11), PtIP-83Ce (SEQ ID NO: 13), PtIP-83Cf (SEQ ID NO: 15), and PtIP-83Fa (SEQ ID NO: 3); an alignment of the secondary structure prediction, by the PSIPRED, top ranked secondary structure prediction method, for PtIP-83Aa (SEQ ID NO: 1) and PtIP-83Fa (SEQ ID NO: 3); and the locations of the amino acid sequence MOTIFs, as predicted by MEME motif analysis, relative to PtIP-83Aa (SEQ ID NO: 1). A “H” indicates a predicted helical structure, an “E” indicates a PtIP-beta strand structure, and a “C” indicates a predicted coil structure.

[0015] FIG. 3a-3b shows a sequence alignment between PtIP-83Aa (SEQ ID NO: 1) and PtIP-50Aa (SEQ ID NO: 34). The crossover points in the PtIP-83 Aa/PtIP-50Aa chimeras indicated in Table 13 are indicated by an arrow (↓) above the amino acid.

[0016] FIG. 4a-4c shows an amino acid sequence alignment of PtIP-83Aa (SEQ ID NO: 1), PtIP-83Fa (SEQ ID NO: 3), PtIP-50Aa (SEQ ID NO: 34), PtIP-50Ba (SEQ ID NO: 35), and PtIP-50Bb (SEQ ID NO: 36). The conserved sequence motifs identified are indicated and the amino acid sequence of the motifs in PtIP-83Aa (SEQ ID NO: 1) are underlined.

[0017] FIG. 5a-5e shows an amino acid sequence alignment of PtIP-83Aa (SEQ ID NO: 1), PtIP-83Ca (SEQ ID NO: 5), PtIP-83Cb (SEQ ID NO: 7), PtIP-83Cc (SEQ ID NO: 9), PtIP-83Cd (SEQ ID NO: 11), PtIP-83Ce (SEQ ID NO: 13), PtIP-83Cf (SEQ ID NO: 15), PtIP-83Cg (SEQ ID NO: 17), and PtIP-83 Da (SEQ ID NO: 19). The sequence diversity is highlighted.

### DETAILED DESCRIPTION

[0018] It is to be understood that this disclosure is not limited to the particular methodology, protocols, cell lines, genera, and reagents described, as such may vary. It is also to be understood that the terminology used herein is for the purpose of describing particular embodiments only, and is not intended to limit the scope of the present disclosure.

[0019] As used herein the singular forms “a”, “and”, and “the” include plural referents unless the context clearly dictates otherwise. Thus, for example, reference to “a cell” includes a plurality of such cells and reference to “the protein” includes reference to one or more proteins and equivalents thereof known to those skilled in the art, and so forth. All technical and scientific terms used herein have the same meaning as commonly understood to one of ordinary skill in the art to which this disclosure belongs unless clearly indicated otherwise.

[0020] The present disclosure is drawn to compositions and methods for controlling pests. The methods involve transforming organisms with nucleic acid sequences encoding PtIP-83 polypeptides. In particular, the nucleic acid sequences of the embodiments are useful for preparing plants and microorganisms that possess pesticidal activity. Thus, transformed bacteria, plants, plant cells, plant tissues and seeds are provided. The compositions are pesticidal nucleic acids and proteins of bacterial species. The nucleic acid sequences find use in the construction of expression vectors for subsequent transformation into organisms of interest, as probes for the isolation of other homologous (or partially homologous) genes, and for the generation of altered PtIP-83 polypeptides by methods known in the art, such as site directed mutagenesis, domain swapping or DNA shuffling. The PtIP-83 find use in controlling or killing Lepidopteran, Coleopteran, Dipteran, fungal, Hemipteran and nematode pest populations and for producing compositions with pesticidal activity. Insect pests of interest include, but are not limited to, Lepidoptera species including but not limited to: Corn Earworm, (CEW) (Helicoverpa zea), European Corn Borer (ECB) (Ostrinia nubilalis), diamond-back moth, e.g., Helicoverpa zea Boddie; soybean looper, e.g., Pseudoplusia includens Walker; and velvet bean caterpillar e.g., Anticarsia gemmatalis Hübner and Coleoptera species including but not limited to Western corn rootworm (Diabrotica virgifera)—WCRW, Southern corn rootworm (Diabrotica undecimpunctata howardi)—SCRW, and Northern corn rootworm (Diabrotica barberi)—NCRW.

[0021] By “pesticidal toxin” or “pesticidal protein” is used herein to refer to a toxin that has toxic activity against one or more pests, including, but not limited to, members of the Lepidoptera, Diptera, Hemiptera and Coleoptera orders or the Nematoda phylum or a protein that has homology to such a protein. Pesticidal proteins have been purified from organisms including, for example, Bacillus sp., Pseudomonas sp., Photorhabdus sp., Xenorhabdus sp., Clostridium bifermentans and Paenibacillus popilliae. Pesticidal proteins include but are not limited to: insecticidal proteins from Pseudomonas sp. such as PSEEN3174 (Monalysin; (2011) PLoS Pathogens 7:1-13); from Pseudomonas protegens strain CHAO and Pf-5 (previously fluorescens) (Pechy-Tarr, (2008) Environmental Microbiology 10:2368-2386; GenBank Accession No. EU400157); from Pseudomonas Taiwanensis (Liu, et al., (2010) J. Agric. Food Chem., 58:12343-12349) and from Pseudomonas pseudoalcligenes (Zhang, et al., (2009) Annals of Microbiology 59:45-50 and Li, et al., (2007) Plant Cell Tiss. Organ Cult. 89:159-168); insecticidal proteins from Photorhabdus sp. and Xenorhabdus sp. (Hinchliffe, et al., (2010) The Open Toxicology Journal, 3:101-118 and Morgan, et al., (2001) Applied and Envir. Micro. 67:2062-2069); U.S. Pat. Nos. 6,048,838, and 6,379,946; a PIP-1 polypeptide of US Patent Publication US20140007292; an AfIP-1A and/or AfIP-1B polypeptide of US Patent Publication US20140033361; a PHI-4 polypeptide of US patent Publication US20140274885 and PCT Patent Publication WO2014/150914; a PIP-47 polypeptide of PCT Serial Number PCT/US14/51063, a PIP-72 polypeptide of PCT Serial Number PCT/US14/55128, and δ-endotoxins including, but not limited to, the Cry1, Cry2, Cry3, Cry4, Cry5, Cry6, Cry7, Cry8, Cry9, Cry10, Cry11, Cry12, Cry13, Cry14, Cry15, Cry16, Cry17, Cry18, Cry19, Cry20, Cry21, Cry22, Cry23, Cry24, Cry25, Cry26, Cry27, Cry 28, Cry 29, Cry 30, Cry31, Cry32, Cry33, Cry34, Cry35,Cry36, Cry37, Cry38, Cry39, Cry40, Cry41, Cry42, Cry43, Cry44, Cry45, Cry 46, Cry47, Cry49, Cry50, Cry51, Cry52, Cry53, Cry 54, Cry55, Cry56, Cry57, Cry58, Cry59, Cry60, Cry61, Cry62, Cry63, Cry64, Cry65, Cry66, Cry67, Cry68, Cry69, Cry70, Cry71, and Cry 72 classes of δ-endotoxin genes and the B. thuringiensis cytolytic cyt1 and cyt2 genes. Members of these classes of B. thuringiensis insecticidal proteins include, but are not limited to Cry1Aa1 (Accession #AAA22353); Cry1Aa2 (Accession #Accession #AAA22552); Cry1Aa3 (Accession #BAA00257); Cry1Aa4 (Accession #CAA31886); Cry1Aa5 (Accession #BAA04468); Cry1Aa6 (Accession #AAA86265); Cry1Aa7 (Accession #AAD46139); Cry1Aa8 (Accession #126149); Cry1Aa9 (Accession #BAA77213); Cry1Aa10 (Accession #AAD55382); Cry1Aa11 (Accession #CAA70856); Cry1Aa12 (Accession #AAP80146); Cry1Aa13 (Accession #AAM44305); Cry1Aa14 (Accession #AAP40639); Cry1Aa15 (Accession #AAY66993); Cry1Aa16 (Accession #HQ439776); Cry1Aa17 (Accession #HQ439788); Cry1Aa18 (Accession #HQ439790); Cry1Aa19 (Accession #HQ685121); Cry1Aa20 (Accession #JF340156); Cry1Aa21 (Accession #JN651496); Cry1Aa22 (Accession #KC158223); Cry1Ab1 (Accession #AAA22330); Cry1Ab2 (Accession #AAA22613); Cry1Ab3 (Accession #AAA22561); Cry1Ab4 (Accession #BAA00071); Cry1Ab5 (Accession #CAA28405); Cry1Ab6 (Accession #AAA22420); Cry1Ab7 (Accession #CAA31620); Cry1Ab8 (Accession #AAA22551); Cry1Ab9 (Accession #CAA38701); Cry1Ab10 (Accession #A29125); Cry1Ab11 (Accession #112419); Cry1Ab12 (Accession #AAC64003); Cry1Ab13 (Accession #AAN76494); Cry1Ab14 (Accession #AAG16877); Cry1Ab15 (Accession #AA013302); Cry1Ab16 (Accession #AAK55546); Cry1Ab17 (Accession #AAT46415); Cry1Ab18 (Accession #AAQ88259); Cry1Ab19 (Accession #AAW31761); Cry1Ab20 (Accession #ABB72460); Cry1Ab21 (Accession #ABS18384); Cry1Ab22 (Accession #ABW87320); Cry1Ab23 (Accession #HQ439777); Cry1Ab24 (Accession #HQ439778); Cry1Ab25 (Accession #HQ685122); Cry1Ab26 (Accession #HQ847729); Cry1Ab27 (Accession #JN135249); Cry1Ab28 (Accession #JN135250); Cry1Ab29 (Accession #JN135251); Cry1Ab30 (Accession #JN135252); Cry1Ab31 (Accession #JN135253); Cry1Ab32 (Accession #JN135254); Cry1Ab33 (Accession #AAS93798); Cry1Ab34 (Accession #KC156668); Cry1Ab-like (Accession #AAK14336); Cry1Ab-like (Accession #AAK14337); Cry1Ab-like (Accession #AAK14338); Cry1Ab-like (Accession #ABG88858); Cry1Ac1 (Accession #AAA22331); Cry1Ac2 (Accession #AAA22338); Cry1Ac3 (Accession #CAA38098); Cry1Ac4 (Accession #AAA73077); Cry1Ac5 (Accession #AAA22339); Cry1Ac6 (Accession #AAA86266); Cry1Ac7 (Accession #AAB46989); Cry1Ac8 (Accession #AAC44841); Cry1Ac9 (Accession #AAB49768); Cry1Ac10 (Accession #CAA05505); Cry1Ac11 (Accession #CAA10270); Cry1Ac12 (Accession #112418); Cry1Ac13 (Accession #AAD38701); Cry1Ac14 (Accession #AAQ06607); Cry1Ac15 (Accession #AAN07788); Cry1Ac16 (Accession #AAU87037); Cry1Ac17 (Accession #AAX18704); Cry1Ac18 (Accession #AAY88347); Cry1Ac19 (Accession #ABD37053); Cry1Ac20 (Accession #ABB89046); Cry1Ac21 (Accession #AAY66992); Cry1Ac22 (Accession #ABZ01836); Cry1Ac23 (Accession #CAQ30431); Cry1Ac24 (Accession #ABL01535); Cry1Ac25 (Accession #FJ513324); Cry1Ac26 (Accession #FJ617446); Cry1Ac27 (Accession #FJ617447); Cry1Ac28 (Accession #ACM90319); Cry1Ac29 (Accession #DQ438941); Cry1Ac30 (Accession #GQ227507); Cry1Ac31 (Accession #GU446674); Cry1Ac32 (Accession #HM061081); Cry1Ac33 (Accession #GQ866913); Cry1Ac34 (Accession #HQ230364); Cry1Ac35 (Accession #JF340157); Cry1Ac36 (Accession #JN387137); Cry1Ac37 (Accession #JQ317685); Cry1Ad1 (Accession #AAA22340); Cry1Ad2 (Accession #CAA01880); Cry1Ae1 (Accession #AAA22410); Cry1Af1 (Accession #AAB82749); Cry1Ag1 (Accession #AAD46137); Cry1Ah1 (Accession #AAQ14326); Cry1Ah2 (Accession #ABB76664); Cry1Ah3 (Accession #HQ439779); Cry1Ai1 (Accession #AA039719); Cry1Ai2 (Accession #HQ439780); Cry1A-like (Accession #AAK14339); Cry1Ba1 (Accession #CAA29898); Cry1Ba2 (Accession #CAA65003); Cry1Ba3 (Accession #AAK63251); Cry1Ba4 (Accession #AAK51084); Cry1Ba5 (Accession #AB020894); Cry1Ba6 (Accession #ABL60921); Cry1Ba7 (Accession #HQ439781); Cry1Bb1 (Accession #AAA22344); Cry1Bb2 (Accession #HQ439782); Cry1Bc1 (Accession #CAA86568); Cry1Bd1 (Accession #AAD10292); Cry1Bd2 (Accession #AAM93496); Cry1Be1 (Accession #AAC32850); Cry1Be2 (Accession #AAQ52387); Cry1Be3 (Accession #ACV96720); Cry1Be4 (Accession #HM070026); Cry1Bf1 (Accession #CAC50778); Cry1Bf2 (Accession #AAQ52380); Cry1Bg1 (Accession #AA039720); Cry1Bh1 (Accession #HQ589331); Cry1Bi1 (Accession #KC156700); Cry1Ca1 (Accession #CAA30396); Cry1Ca2 (Accession #CAA31951); Cry1Ca3 (Accession #AAA22343); Cry1Ca4 (Accession #CAA01886); Cry1Ca5 (Accession #CAA65457); Cry1Ca6 [1](Accession #AAF37224); Cry1Ca7 (Accession #AAG50438); Cry1Ca8 (Accession #AAM00264); Cry1Ca9 (Accession #AAL79362); Cry1Ca10 (Accession #AAN16462); Cry1Ca11 (Accession #AAX53094); Cry1Ca12 (Accession #HM070027); Cry1Ca13 (Accession #HQ412621); Cry1Ca14 (Accession #JN651493); Cry1Cb1 (Accession #M97880); Cry1Cb2 (Accession #AAG35409); Cry1Cb3 (Accession #ACD50894); Cry1Cb-like (Accession #AAX63901); Cry1Dal (Accession #CAA38099); Cry1Da2 (Accession #176415); Cry1Da3 (Accession #HQ439784); Cry1Db1 (Accession #CAA80234); Cry1Db2 (Accession #AAK48937); Cry1Dc1 (Accession #ABK35074); Cry1Ea1 (Accession #CAA37933); Cry1Ea2 (Accession #CAA39609); Cry1Ea3 (Accession #AAA22345); Cry1Ea4 (Accession #AAD04732); Cry1Ea5 (Accession #A15535); Cry1Ea6 (Accession #AAL50330); Cry1Ea7 (Accession #AAW72936); Cry1Ea8 (Accession #ABX11258); Cry1Ea9 (Accession #HQ439785); Cry1Ea10 (Accession #ADR00398); Cry1Ea11 (Accession #JQ652456); Cry1Eb1 (Accession #AAA22346); Cry1Fa1 (Accession #AAA22348); Cry1Fa2 (Accession #AAA22347); Cry1Fa3 (Accession #HM070028); Cry1Fa4 (Accession #HM439638); Cry1Fb1 (Accession #CAA80235); Cry1Fb2 (Accession #BAA25298); Cry1Fb3 (Accession #AAF21767); Cry1Fb4 (Accession #AAC10641); Cry1Fb5 (Accession #AA013295); Cry1Fb6 (Accession #ACD50892); Cry1Fb7 (Accession #ACD50893); Cry1Ga1 (Accession #CAA80233); Cry1Ga2 (Accession #CAA70506); Cry1Gb1 (Accession #AAD10291); Cry1Gb2 (Accession #AA013756); Cry1G1 (Accession #AAQ52381); Cry1Hal (Accession #CAA80236); Cry1Hb1 (Accession #AAA79694); Cry1Hb2 (Accession #HQ439786); Cry1H-like (Accession #AAF01213); Cry1Ia1 (Accession #CAA44633); Cry1Ia2 (Accession #AAA22354); Cry1Ia3 (Accession #AAC36999); Cry1Ia4 (Accession #AAB00958); Cry1Ia5 (Accession #CAA70124); Cry1Ia6 (Accession #AAC26910); Cry1Ia7 (Accession #AAM73516); Cry1Ia8 (Accession #AAK66742); Cry1Ia9 (Accession #AAQ08616); Cry1Ia10 (Accession #AAP86782); Cry1Ia11 (Accession #CAC85964); Cry1Ia12 (Accession #AAV53390); Cry1Ia13 (Accession #ABF83202); Cry1Ia14 (Accession #ACG63871); Cry1Ia15 (Accession #FJ617445); Cry1Ia16 (Accession #FJ617448); Cry1Ia17 (Accession #GU989199); Cry1Ia18 (Accession #ADK23801); Cry1Ia19 (Accession #HQ439787); Cry1Ia20 (Accession #JQ228426); Cry1Ia21 (Accession #JQ228424); Cry1Ia22 (Accession #JQ228427); Cry1Ia23 (Accession #JQ228428); Cry1Ia24 (Accession #JQ228429); Cry1Ia25 (Accession #JQ228430); Cry1Ia26 (Accession #JQ228431); Cry1Ia27 (Accession #JQ228432); Cry1Ia28 (Accession #JQ228433); Cry1Ia29 (Accession #JQ228434); Cry1Ia30 (Accession #JQ317686); Cry1Ia31 (Accession #JX944038); Cry1Ia32 (Accession #JX944039); Cry1Ia33 (Accession #JX944040); Cry1Ib1 (Accession #AAA82114); Cry1Ib2 (Accession #ABW88019); Cry1Ib3 (Accession #ACD75515); Cry1Ib4 (Accession #HM051227); Cry1Ib5 (Accession #HM070028); Cry1Ib6 (Accession #ADK38579); Cry1Ib7 (Accession #JN571740); Cry1Ib8 (Accession #JN675714); Cry1Ib9 (Accession #JN675715); Cry1Ib10 (Accession #JN675716); Cry1bI1 (Accession #JQ228423); Cry1Ic1 (Accession #AAC62933); Cry 11c2 (Accession #AAE71691); Cry1 Id1 (Accession #AAD44366); Cry1Id2 (Accession #JQ228422); Cry1Ie1 (Accession #AAG43526); Cry1Ie2 (Accession #HM439636); Cry1Ie3 (Accession #KC156647); Cry11e4 (Accession #KC156681); Cry1 If1 (Accession #AAQ52382); Cry1Ig1 (Accession #KC156701); Cry1I-like (Accession #AAC31094); Cry1 I-like (Accession #ABG88859); Cry1Ja1 (Accession #AAA22341); Cry1Ja2 (Accession #HM070030); Cry1Ja3 (Accession #JQ228425); Cry1Jb1 (Accession #AAA98959); Cry1Jc1 (Accession #AAC31092); Cry1Jc2 (Accession #AAQ52372); Cry1Jd1 (Accession #CAC50779); Cry1Ka1 (Accession #AAB00376); Cry1Ka2 (Accession #HQ439783); Cry1La1 (Accession #AAS60191); Cry1La2 (Accession #HM070031); Cry1Ma1 (Accession #FJ884067); Cry1Ma2 (Accession #KC156659); Cry1Na1 (Accession #KC156648); Cry1Nb1 (Accession #KC156678); Cry1-like (Accession #AAC31091); Cry2Aa1 (Accession #AAA22335); Cry2Aa2 (Accession #AAA83516); Cry2Aa3 (Accession #D86064); Cry2Aa4 (Accession #AAC04867); Cry2Aa5 (Accession #CAA10671); Cry2Aa6 (Accession #CAA10672); Cry2Aa7 (Accession #CAA10670); Cry2Aa8 (Accession #AA013734); Cry2Aa9 (Accession #AA013750); Cry2Aa10 (Accession #AAQ04263); Cry2Aa11 (Accession #AAQ52384); Cry2Aa12 (Accession #AB183671); Cry2Aa13 (Accession #ABL01536); Cry2Aa14 (Accession #ACF04939); Cry2Aa15 (Accession #JN426947); Cry2Ab1 (Accession #AAA22342); Cry2Ab2 (Accession #CAA39075); Cry2Ab3 (Accession #AAG36762); Cry2Ab4 (Accession #AA013296); Cry2Ab5 (Accession #AAQ04609); Cry2Ab6 (Accession #AAP59457); Cry2Ab7 (Accession #AAZ66347); Cry2Ab8 (Accession #ABC95996); Cry2Ab9 (Accession #ABC74968); Cry2Ab10 (Accession #EF157306); Cry2Ab11 (Accession #CAM84575); Cry2Ab12 (Accession #ABM21764); Cry2Ab13 (Accession #ACG76120); Cry2Ab14 (Accession #ACG76121); Cry2Ab15 (Accession #HM037126); Cry2Ab16 (Accession #GQ866914); Cry2Ab17 (Accession #HQ439789); Cry2Ab18 (Accession #JN135255); Cry2Ab19 (Accession #JN135256); Cry2Ab20 (Accession #JN135257); Cry2Ab21 (Accession #JN135258); Cry2Ab22 (Accession #JN135259); Cry2Ab23 (Accession #JN135260); Cry2Ab24 (Accession #JN135261); Cry2Ab25 (Accession #JN415485); Cry2Ab26 (Accession #JN426946); Cry2Ab27 (Accession #JN415764); Cry2Ab28 (Accession #JN651494); Cry2Ac1 (Accession #CAA40536); Cry2Ac2 (Accession #AAG35410); Cry2Ac3 (Accession #AAQ52385); Cry2Ac4 (Accession #ABC95997); Cry2Ac5 (Accession #ABC74969); Cry2Ac6 (Accession #ABC74793); Cry2Ac7 (Accession #CAL18690); Cry2Ac8 (Accession #CAM09325); Cry2Ac9 (Accession #CAM09326); Cry2Ac10 (Accession #ABN15104); Cry2Ac11 (Accession #CAM83895); Cry2Ac12 (Accession #CAM83896); Cry2Ad1 (Accession #AAF09583); Cry2Ad2 (Accession #ABC86927); Cry2Ad3 (Accession #CAK29504); Cry2Ad4 (Accession #CAM32331); Cry2Ad5 (Accession #CA078739); Cry2Ae1 (Accession #AAQ52362); Cry2Af1 (Accession #AB030519); Cry2Af2 (Accession #GQ866915); Cry2Ag1 (Accession #ACH91610); Cry2Ah1 (Accession #EU939453); Cry2Ah2 (Accession #ACL80665); Cry2Ah3 (Accession #GU073380); Cry2Ah4 (Accession #KC156702); Cry2Ai1 (Accession #FJ788388); Cry2Aj (Accession #); Cry2Ak1 (Accession #KC156660); Cry2Ba1 (Accession #KC156658); Cry3Aa1 (Accession #AAA22336); Cry3Aa2 (Accession #AAA22541); Cry3Aa3 (Accession #CAA68482); Cry3Aa4 (Accession #AAA22542); Cry3Aa5 (Accession #AAA50255); Cry3Aa6 (Accession #AAC43266); Cry3Aa7 (Accession #CAB41411); Cry3Aa8 (Accession #AAS79487); Cry3Aa9 (Accession #AAW05659); Cry3Aa10 (Accession #AAU29411); Cry3Aa11 (Accession #AAW82872); Cry3Aa12 (Accession #ABY49136); Cry3Ba1 (Accession #CAA34983); Cry3Ba2 (Accession #CAA00645); Cry3Ba3 (Accession #JQ397327); Cry3Bb1 (Accession #AAA22334); Cry3Bb2 (Accession #AAA74198); Cry3Bb3 (Accession #115475); Cry3Ca1 (Accession #CAA42469); Cry4Aa1 (Accession #CAA68485); Cry4Aa2 (Accession #BAA00179); Cry4Aa3 (Accession #CAD30148); Cry4Aa4 (Accession #AFB18317); Cry4A-like (Accession #AAY96321); Cry4Ba1 (Accession #CAA30312); Cry4Ba2 (Accession #CAA30114); Cry4Ba3 (Accession #AAA22337); Cry4Ba4 (Accession #BAA00178); Cry4Ba5 (Accession #CAD30095); Cry4Ba-like (Accession #ABC47686); Cry4Ca1 (Accession #EU646202); Cry4Cb1 (Accession #FJ403208); Cry4Cb2 (Accession #FJ597622); Cry4Cc1 (Accession #FJ403207); Cry5Aa1 (Accession #AAA67694); Cry5Ab1 (Accession #AAA67693); Cry5Ac1 (Accession #134543); Cry5Ad1 (Accession #ABQ82087); Cry5Ba1 (Accession #AAA68598); Cry5Ba2 (Accession #ABW88931); Cry5Ba3 (Accession #AFJ04417); Cry5Ca1 (Accession #HM461869); Cry5Ca2 (Accession #ZP_04123426); Cry5Da1 (Accession #HM461870); Cry5Da2 (Accession #ZP_04123980); Cry5Ea1 (Accession #HM485580); Cry5Ea2 (Accession #ZP_04124038); Cry6Aa1 (Accession #AAA22357); Cry6Aa2 (Accession #AAM46849); Cry6Aa3 (Accession #ABH03377); Cry6Ba1 (Accession #AAA22358); Cry7Aa1 (Accession #AAA22351); Cry7Ab1 (Accession #AAA21120); Cry7Ab2 (Accession #AAA21121); Cry7Ab3 (Accession #ABX24522); Cry7Ab4 (Accession #EU380678); Cry7Ab5 (Accession #ABX79555); Cry7Ab6 (Accession #AC144005); Cry7Ab7 (Accession #ADB89216); Cry7Ab8 (Accession #GU145299); Cry7Ab9 (Accession #ADD92572); Cry7Ba1 (Accession #ABB70817); Cry7Bb1 (Accession #KC156653); Cry7Ca1 (Accession #ABR67863); Cry7Cb1 (Accession #KC156698); Cry7Da1 (Accession #ACQ99547); Cry7Da2 (Accession #HM572236); Cry7Da3 (Accession #KC156679); Cry7Ea1 (Accession #HM035086); Cry7Ea2 (Accession #HM132124); Cry7Ea3 (Accession #EEM19403); Cry7Fa1 (Accession #HM035088); Cry7Fa2 (Accession #EEM19090); Cry7Fb1 (Accession #HM572235); Cry7Fb2 (Accession #KC156682); Cry7Ga1 (Accession #HM572237); Cry7Ga2 (Accession #KC156669); Cry7Gb1 (Accession #KC156650); Cry7Gc1 (Accession #KC156654); Cry7Gd1 (Accession #KC156697); Cry7Ha1 (Accession #KC156651); Cry7Ia1 (Accession #KC156665); Cry7Ja1 (Accession #KC156671); Cry7Ka1 (Accession #KC156680); Cry7Kb1 (Accession #BAM99306); Cry7La1 (Accession #BAM99307); Cry8Aa1 (Accession #AAA21117); Cry8Ab1 (Accession #EU044830); Cry8Ac1 (Accession #KC156662); Cry8Ad1 (Accession #KC156684); Cry8Ba1 (Accession #AAA21118); Cry8Bb1 (Accession #CAD57542); Cry8Bc1 (Accession #CAD57543); Cry8Ca1 (Accession #AAA21119); Cry8Ca2 (Accession #AAR98783); Cry8Ca3 (Accession #EU625349); Cry8Ca4 (Accession #ADB54826); Cry8Da1 (Accession #BAC07226); Cry8Da2 (Accession #BD133574); Cry8Da3 (Accession #BD133575); Cry8Db1 (Accession #BAF93483); Cry8Ea1 (Accession #AAQ73470); Cry8Ea2 (Accession #EU047597); Cry8Ea3 (Accession #KC855216); Cry8Fa1 (Accession #AAT48690); Cry8Fa2 (Accession #HQ174208); Cry8Fa3 (Accession #AFH78109); Cry8Ga1 (Accession #AAT46073); Cry8Ga2 (Accession #ABC42043); Cry8Ga3 (Accession #FJ198072); Cry8Ha1 (Accession #AAW81032); Cry8Ia1 (Accession #EU381044); Cry8Ia2 (Accession #GU073381); Cry8Ia3 (Accession #HM044664); Cry8Ia4 (Accession #KC156674); Cry8Ib1 (Accession #GU325772); Cry8Ib2 (Accession #KC156677); Cry8Ja1 (Accession #EU625348); Cry8Ka1 (Accession #FJ422558); Cry8Ka2 (Accession #ACN87262); Cry8Kb1 (Accession #HM123758); Cry8Kb2 (Accession #KC156675); Cry8La1 (Accession #GU325771); Cry8Ma1 (Accession #HM044665); Cry8Ma2 (Accession #EEM86551); Cry8Ma3 (Accession #HM210574); Cry8Na1 (Accession #HM640939); Cry8Pa1 (Accession #HQ388415); Cry8Qa1 (Accession #HQ441166); Cry8Qa2 (Accession #KC152468); Cry8Ra1 (Accession #AFP87548); Cry8Sa1 (Accession #JQ740599); Cry8Ta1 (Accession #KC156673); Cry8-like (Accession #FJ770571); Cry8-like (Accession #ABS53003); Cry9Aa1 (Accession #CAA41122); Cry9Aa2 (Accession #CAA41425); Cry9Aa3 (Accession #GQ249293); Cry9Aa4 (Accession #GQ249294); Cry9Aa5 (Accession #JX174110); Cry9Aa like (Accession #AAQ52376); Cry9Ba1 (Accession #CAA52927); Cry9Ba2 (Accession #GU299522); Cry9Bb1 (Accession #AAV28716); Cry9Ca1 (Accession #CAA85764); Cry9Ca2 (Accession #AAQ52375); Cry9Da1 (Accession #BAA19948); Cry9Da2 (Accession #AAB97923); Cry9Da3 (Accession #G0249293); Cry9Da4 (Accession #G0249297); Cry9Db1 (Accession #AAX78439); Cry9Dc1 (Accession #KC156683); Cry9Ea1 (Accession #BAA34908); Cry9Ea2 (Accession #AA012908); Cry9Ea3 (Accession #ABM21765); Cry9Ea4 (Accession #ACE88267); Cry9Ea5 (Accession #ACF04743); Cry9Ea6 (Accession #ACG63872); Cry9Ea7 (Accession #FJ380927); Cry9Ea8 (Accession #GQ249292); Cry9Ea9 (Accession #JN651495); Cry9Eb1 (Accession #CAC50780); Cry9Eb2 (Accession #GQ249298); Cry9Eb3 (Accession #KC156646); Cry9Ec1 (Accession #AAC63366); Cry9Ed1 (Accession #AAX78440); Cry9Ee1 (Accession #GQ249296); Cry9Ee2 (Accession #KC156664); Cry9Fa1 (Accession #KC156692); Cry9Ga1 (Accession #KC156699); Cry9-like (Accession #AAC63366); Cry10Aa1 (Accession #AAA22614); Cry10Aa2 (Accession #E00614); Cry10Aa3 (Accession #CAD30098); Cry10Aa4 (Accession #AFB18318); Cry10A-like (Accession #DQ167578); Cry11Aa1 (Accession #AAA22352); Cry11Aa2 (Accession #AAA22611); Cry11Aa3 (Accession #CAD30081); Cry11Aa4 (Accession #AFB18319); Cry11Aa-like (Accession #DQ166531); Cry11Ba1 (Accession #CAA60504); Cry11Bb1 (Accession #AAC97162); Cry11Bb2 (Accession #HM068615); Cry12Aa1 (Accession #AAA22355); Cry13Aa1 (Accession #AAA22356); Cry14Aa1 (Accession #AAA21516); Cry14Ab1 (Accession #KC156652); Cry15Aa1 (Accession #AAA22333); Cry16Aa1 (Accession #CAA63860); Cry17Aa1 (Accession #CAA67841); Cry18Aa1 (Accession #CAA67506); Cry18Ba1 (Accession #AAF89667); Cry18Ca1 (Accession #AAF89668); Cry19Aa1 (Accession #CAA68875); Cry19Ba1 (Accession #BAA32397); Cry19Ca1 (Accession #AFM37572); Cry20Aa1 (Accession #AAB93476); Cry20Bal (Accession #ACS93601); Cry20Ba2 (Accession #KC156694); Cry20-like (Accession #GQ144333); Cry21Aa1 (Accession #132932); Cry21Aa2 (Accession #166477); Cry21Ba1 (Accession #BAC06484); Cry21Ca1 (Accession #JF521577); Cry21Ca2 (Accession #KC156687); Cry21Da1 (Accession #JF521578); Cry22Aa1 (Accession #134547); Cry22Aa2 (Accession #CAD43579); Cry22Aa3 (Accession #ACD93211); Cry22Ab1 (Accession #AAK50456); Cry22Ab2 (Accession #CAD43577); Cry22Ba1 (Accession #CAD43578); Cry22Bb1 (Accession #KC156672); Cry23Aa1 (Accession #AAF76375); Cry24Aa1 (Accession #AAC61891); Cry24Ba1 (Accession #BAD32657); Cry24Ca1 (Accession #CAJ43600); Cry25Aa1 (Accession #AAC61892); Cry26Aa1 (Accession #AAD25075); Cry27Aa1 (Accession #BAA82796); Cry28Aa1 (Accession #AAD24189); Cry28Aa2 (Accession #AAG00235); Cry29Aa1 (Accession #CAC80985); Cry30Aa1 (Accession #CAC80986); Cry30Ba1 (Accession #BAD00052); Cry30Ca1 (Accession #BAD67157); Cry30Ca2 (Accession #ACU24781); Cry30Da1 (Accession #EF095955); Cry30Db1 (Accession #BAE80088); Cry30Ea1 (Accession #ACC95445); Cry30Ea2 (Accession #FJ499389); Cry30Fa1 (Accession #AC122625); Cry30Ga1 (Accession #ACG60020); Cry30Ga2 (Accession #HQ638217); Cry31Aa1 (Accession #BAB11757); Cry31Aa2 (Accession #AAL87458); Cry31Aa3 (Accession #BAE79808); Cry31Aa4 (Accession #BAF32571); Cry31Aa5 (Accession #BAF32572); Cry31Aa6 (Accession #BA144026); Cry31Ab1 (Accession #BAE79809); Cry31Ab2 (Accession #BAF32570); Cry31Ac1 (Accession #BAF34368); Cry31Ac2 (Accession #AB731600); Cry31Ad1 (Accession #BA144022); Cry32Aa1 (Accession #AAG36711); Cry32Aa2 (Accession #GU063849); Cry32Ab1 (Accession #GU063850); Cry32Ba1 (Accession #BAB78601); Cry32Ca1 (Accession #BAB78602); Cry32Cb1 (Accession #KC156708); Cry32Da1 (Accession #BAB78603); Cry32Ea1 (Accession #GU324274); Cry32Ea2 (Accession #KC156686); Cry32Eb1 (Accession #KC156663); Cry32Fa1 (Accession #KC156656); Cry32Ga1 (Accession #KC156657); Cry32Ha1 (Accession #KC156661); Cry32Hb1 (Accession #KC156666); Cry321a1 (Accession #KC156667); Cry32Ja1 (Accession #KC156685); Cry32Ka1 (Accession #KC156688); Cry32La1 (Accession #KC156689); Cry32Ma1 (Accession #KC156690); Cry32Mb1 (Accession #KC156704); Cry32Na1 (Accession #KC156691); Cry320a1 (Accession #KC156703); Cry32Pa1 (Accession #KC156705); Cry32Qa1 (Accession #KC156706); Cry32Ra1 (Accession #KC156707); Cry32Sa1 (Accession #KC156709); Cry32Ta1 (Accession #KC156710); Cry32Ua1 (Accession #KC156655); Cry33Aa1 (Accession #AAL26871); Cry34Aa1 (Accession #AAG50341); Cry34Aa2 (Accession #AAK64560); Cry34Aa3 (Accession #AAT29032); Cry34Aa4 (Accession #AAT29030); Cry34Ab1 (Accession #AAG41671); Cry34Ac1 (Accession #AAG50118); Cry34Ac2 (Accession #AAK64562); Cry34Ac3 (Accession #AAT29029); Cry34Ba1 (Accession #AAK64565); Cry34Ba2 (Accession #AAT29033); Cry34Ba3 (Accession #AAT29031); Cry35Aa1 (Accession #AAG50342); Cry35Aa2 (Accession #AAK64561); Cry35Aa3 (Accession #AAT29028); Cry35Aa4 (Accession #AAT29025); Cry35Ab1 (Accession #AAG41672); Cry35Ab2 (Accession #AAK64563); Cry35Ab3 (Accession #AY536891); Cry35Ac1 (Accession #AAG50117); Cry35Ba1 (Accession #AAK64566); Cry35Ba2 (Accession #AAT29027); Cry35Ba3 (Accession #AAT29026); Cry36Aa1 (Accession #AAK64558); Cry37Aa1 (Accession #AAF76376); Cry38Aa1 (Accession #AAK64559); Cry39Aa1 (Accession #BAB72016); Cry40Aa1 (Accession #BAB72018); Cry40Ba1 (Accession #BAC77648); Cry40Ca1 (Accession #EU381045); Cry40Da1 (Accession #ACF15199); Cry41Aa1 (Accession #BAD35157); Cry41Ab1 (Accession #BAD35163); Cry41Ba1 (Accession #HM461871); Cry41Ba2 (Accession #ZP_04099652); Cry42Aa1 (Accession #BAD35166); Cry43Aa1 (Accession #BAD15301); Cry43Aa2 (Accession #BAD95474); Cry43Ba1 (Accession #BAD15303); Cry43Ca1 (Accession #KC156676); Cry43Cb1 (Accession #KC156695); Cry43Cc1 (Accession #KC156696); Cry43-like (Accession #BAD15305); Cry44Aa (Accession #BAD08532); Cry45Aa (Accession #BAD22577); Cry46Aa (Accession #BAC79010); Cry46Aa2 (Accession #BAG68906); Cry46Ab (Accession #BAD35170); Cry47Aa (Accession #AAY24695); Cry48Aa (Accession #CAJ18351); Cry48Aa2 (Accession #CAJ86545); Cry48Aa3 (Accession #CAJ86546); Cry48Ab (Accession #CAJ86548); Cry48Ab2 (Accession #CAJ86549); Cry49Aa (Accession #CAH56541); Cry49Aa2 (Accession #CAJ86541); Cry49Aa3 (Accession #CAJ86543); Cry49Aa4 (Accession #CAJ86544); Cry49Ab1 (Accession #CAJ86542); Cry50Aa1 (Accession #BAE86999); Cry50Ba1 (Accession #GU446675); Cry50Ba2 (Accession #GU446676); Cry51Aa1 (Accession #AB114444); Cry51Aa2 (Accession #GU570697); Cry52Aa1 (Accession #EF613489); Cry52Ba1 (Accession #FJ361760); Cry53Aa1 (Accession #EF633476); Cry53Ab1 (Accession #FJ361759); Cry54Aa1 (Accession #ACA52194); Cry54Aa2 (Accession #GQ140349); Cry54Ba1 (Accession #GU446677); Cry55Aa1 (Accession #ABW88932); Cry54Ab1 (Accession #JQ916908); Cry55Aa2 (Accession #AAE33526); Cry56Aa1 (Accession #ACU57499); Cry56Aa2 (Accession #GQ483512); Cry56Aa3 (Accession #JX025567); Cry57Aa1 (Accession #ANC87261); Cry58Aa1 (Accession #ANC87260); Cry59Ba1 (Accession #JN790647); Cry59Aa1 (Accession #ACR43758); Cry60Aa1 (Accession #ACU24782); Cry60Aa2 (Accession #EA057254); Cry60Aa3 (Accession #EEM99278); Cry60Ba1 (Accession #GU810818); Cry60Ba2 (Accession #EA057253); Cry60Ba3 (Accession #EEM99279); Cry61Aa1 (Accession #HM035087); Cry61Aa2 (Accession #HM132125); Cry61Aa3 (Accession #EEM19308); Cry62Aa1 (Accession #HM054509); Cry63Aa1 (Accession #BA144028); Cry64Aa1 (Accession #BAJ05397); Cry65Aa1 (Accession #HM461868); Cry65Aa2 (Accession #ZP_04123838); Cry66Aa1 (Accession #HM485581); Cry66Aa2 (Accession #ZP_04099945); Cry67Aa1 (Accession #HM485582); Cry67Aa2 (Accession #ZP_04148882); Cry68Aa1 (Accession #HQ113114); Cry69Aa1 (Accession #HQ401006); Cry69Aa2 (Accession #JQ821388); Cry69Ab1 (Accession #JN209957); Cry70Aa1 (Accession #JN646781); Cry70Ba1 (Accession #ADO51070); Cry70Bb1 (Accession #EEL67276); Cry71Aa1 (Accession #JX025568); Cry72Aa1 (Accession #JX025569); Cyt1Aa (GenBank Accession Number X03182); Cyt1Ab (GenBank Accession Number X98793); Cyt1B (GenBank Accession Number U37196); Cyt2A (GenBank Accession Number Z14147); and Cyt2B (GenBank Accession Number U52043).

[0022] Examples of δ-endotoxins also include but are not limited to Cry1A proteins of U.S. Pat. Nos. 5,880,275 and 7,858,849; a DIG-3 or DIG-11 toxin (N-terminal deletion of α-helix 1 and/or α-helix 2 variants of cry proteins such as Cry1A, Cry3A) of U.S. Pat. Nos. 8,304,604, 8,304,605 and 8,476,226; Cry1B of U.S. patent application Ser. No. 10/525,318; Cry1C of U.S. Pat. No. 6,033,874; Cry1F of U.S. Pat. Nos. 5,188,960 and 6,218,188; Cry1A/F chimeras of U.S. Pat. Nos. 7,070,982; 6,962,705 and 6,713,063); a Cry2 protein such as Cry2Ab protein of U.S. Pat. No. 7,064,249); a Cry3A protein including but not limited to an engineered hybrid insecticidal protein (eHIP) created by fusing unique combinations of variable regions and conserved blocks of at least two different Cry proteins (US Patent Application Publication Number 2010/0017914); a Cry4 protein; a Cry5 protein; a Cry6 protein; Cry8 proteins of U.S. Pat. Nos. 7,329,736, 7,449,552, 7,803,943, 7,476,781, 7,105,332, 7,378,499 and 7,462,760; a Cry9 protein such as such as members of the Cry9A, Cry9B, Cry9C, Cry9D, Cry9E and Cry9F families; a Cry15 protein of Naimov, et al., (2008) Applied and Environmental Microbiology, 74:7145-7151; a Cry22, a Cry34Ab1 protein of U.S. Pat. Nos. 6,127,180, 6,624,145 and 6,340,593; a CryET33 and cryET34 protein of U.S. Pat. Nos. 6,248,535, 6,326,351, 6,399,330, 6,949,626, 7,385,107 and 7,504,229; a CryET33 and CryET34 homologs of US Patent Publication Number 2006/0191034, 2012/0278954, and PCT Publication Number WO 2012/139004; a Cry35Ab1 protein of U.S. Pat. Nos. 6,083,499, 6,548,291 and 6,340,593; a Cry46 protein, a Cry 51 protein, a Cry binary toxin; a TIC901 or related toxin; TIC807 of US Patent Application Publication Number 2008/0295207; ET29, ET37, TIC809, TIC810, TIC812, TIC127, TIC128 of PCT US 2006/033867; AXMI-027, AXMI-036, and AXMI-038 of U.S. Pat. No. 8,236,757; AXMI-031, AXMI-039, AXMI-040, AXMI-049 of U.S. Pat. No. 7,923,602; AXMI-018, AXMI-020 and AXMI-021 of WO 2006/083891; AXMI-010 of WO 2005/038032; AXMI-003 of WO 2005/021585; AXMI-008 of US Patent Application Publication Number 2004/0250311; AXMI-006 of US Patent Application Publication Number 2004/0216186; AXMI-007 of US Patent Application Publication Number 2004/0210965; AXMI-009 of US Patent Application Number 2004/0210964; AXMI-014 of US Patent Application Publication Number 2004/0197917; AXMI-004 of US Patent Application Publication Number 2004/0197916; AXMI-028 and AXMI-029 of WO 2006/119457; AXMI-007, AXMI-008, AXMI-0080rf2, AXMI-009, AXMI-014 and AXMI-004 of WO 2004/074462; AXMI-150 of U.S. Pat. No. 8,084,416; AXMI-205 of US Patent Application Publication Number 2011/0023184; AXMI-011, AXMI-012, AXMI-013, AXMI-015, AXMI-019, AXMI-044, AXMI-037, AXMI-043, AXMI-033, AXMI-034, AXMI-022, AXMI-023, AXMI-041, AXMI-063 and AXMI-064 of US Patent Application Publication Number 2011/0263488; AXMI-R1 and related proteins of US Patent Application Publication Number 2010/0197592; AXM1221Z, AXM1222z, AXM1223z, AXM1224z and AXM1225z of WO 2011/103248; AXM1218, AXM1219, AXM1220, AXM1226, AXM1227, AXM1228, AXM1229, AXM1230 and AXM1231 of WO 2011/103247; AXMI-115, AXMI-113, AXMI-005, AXMI-163 and AXMI-184 of U.S. Pat. No. 8,334,431; AXMI-001, AXMI-002, AXMI-030, AXMI-035 and AXMI-045 of US Patent Application Publication Number 2010/0298211; AXMI-066 and AXMI-076 of US Patent Application Publication Number 2009/0144852; AXM1128, AXM1130, AXM1131, AXM1133, AXM1140, AXM1141, AXM1142, AXM1143, AXM1144, AXM1146, AXM1148, AXM1149, AXM1152, AXM1153, AXM1154, AXM1155, AXM1156, AXM1157, AXM1158, AXM1162, AXM1165, AXM1166, AXM1167, AXM1168, AXM1169, AXM1170, AXM1171, AXM1172, AXM1173, AXM1174, AXM1175, AXM1176, AXM1177, AXM1178, AXM1179, AXM1180, AXM1181, AXM1182, AXM1185, AXM1186, AXM1187, AXM1188, AXM1189 of U.S. Pat. No. 8,318,900; AXM1079, AXM1080, AXM1081, AXM1082, AXM1091, AXM1092, AXM1096, AXM1097, AXM1098, AXM1099, AXM1100, AXM1101, AXM1102, AXM1103, AXM1104, AXM1107, AXM1108, AXM1109, AXM1110, AXM1111, AXM1112, AXM1114, AXM1116, AXM1117, AXM1118, AXM1119, AXM1120, AXM1121, AXM1122, AXM1123, AXM1124, AXM11257, AXM11268, AXM1127, AXM1129, AXM1164, AXM1151, AXM1161, AXM1183, AXM1132, AXM1138, AXMI137 of US Patent Application Publication Number 2010/0005543, cry proteins such as Cry1A and Cry3A having modified proteolytic sites of U.S. Pat. No. 8,319,019; a Cry1Ac, Cry2Aa and Cry1Ca toxin protein from Bacillus thuringiensis strain VBTS 2528 of US Patent Application Publication Number 2011/0064710. Other Cry proteins are well known to one skilled in the art (see, Crickmore, et al., “Bacillus thuringiensis toxin nomenclature” (2011), at lifesci.sussex.ac.uk/home/Neil_Crickmore/Bt/ which can be accessed on the world-wide web using the “www” prefix). The insecticidal activity of Cry proteins is well known to one skilled in the art (for review, see, van Frannkenhuyzen, (2009) J. Invert. Path. 101:1-16). The use of Cry proteins as transgenic plant traits is well known to one skilled in the art and Cry-transgenic plants including but not limited to plants expressing Cry1Ac, Cry1Ac+Cry2Ab, Cry1Ab, Cry1A.105, Cry1F, Cry1Fa2, Cry1F+Cry1Ac, Cry2Ab, Cry3A, mCry3A, Cry3Bb1, Cry34Ab1, Cry35Ab1, Vip3A, mCry3A, Cry9c and CBI-Bt have received regulatory approval (see, Sanahuja, (2011) Plant Biotech Journal 9:283-300 and the CERA. (2010) GM Crop Database Center for Environmental Risk Assessment (CERA), ILSI Research Foundation, Washington D.C. at cera-gmc.org/index.php?action=gm_crop database which can be accessed on the world-wide web using the “www” prefix). More than one pesticidal proteins well known to one skilled in the art can also be expressed in plants such as Vip3Ab & Cry1Fa (US2012/0317682); Cry1BE & Cry1F (US2012/0311746); Cry1CA & Cry1AB (US2012/0311745); Cry1F & CryCa (US2012/0317681); Cry1DA & Cry1BE (US2012/0331590); Cry1DA & Cry1Fa (US2012/0331589); Cry1AB & Cry1BE (US2012/0324606); Cry1Fa & Cry2Aa and Cry11 & Cry1E (US2012/0324605); Cry34Ab/35Ab and Cry6Aa (US20130167269); Cry34AbNCry35Ab & Cry3Aa (US20130167268); and Cry3A and Cry1Ab or Vip3Aa (US20130116170). Pesticidal proteins also include insecticidal lipases including lipid acyl hydrolases of U.S. Pat. No. 7,491,869, and cholesterol oxidases such as from Streptomyces (Purcell et al. (1993) Biochem Biophys Res Commun 15:1406-1413). Pesticidal proteins also include VIP (vegetative insecticidal proteins) toxins of U.S. Pat. Nos. 5,877,012, 6,107,279 6,137,033, 7,244,820, 7,615,686, and 8,237,020 and the like. Other VIP proteins are well known to one skilled in the art (see, lifesci.sussex.ac.uk/home/Neil_Crickmore/Bt/vip.html which can be accessed on the world-wide web using the “www” prefix). Pesticidal proteins also include toxin complex (TC) proteins, obtainable from organisms such as Xenorhabdus, Photorhabdus and Paenibacillus (see, U.S. Pat. Nos. 7,491,698 and 8,084,418). Some TC proteins have “stand alone” insecticidal activity and other TC proteins enhance the activity of the stand-alone toxins produced by the same given organism. The toxicity of a “stand-alone” TC protein (from Photorhabdus, Xenorhabdus or Paenibacillus, for example) can be enhanced by one or more TC protein “potentiators” derived from a source organism of a different genus. There are three main types of TC proteins. As referred to herein, Class A proteins (“Protein A”) are stand-alone toxins. Class B proteins (“Protein B”) and Class C proteins (“Protein C”) enhance the toxicity of Class A proteins. Examples of Class A proteins are TcbA, TcdA, XptA1 and XptA2. Examples of Class B proteins are TcaC, TcdB, XptB1Xb and XptC1Wi. Examples of Class C proteins are TccC, XptC1Xb and XptB1Wi. Pesticidal proteins also include spider, snake and scorpion venom proteins. Examples of spider venom peptides include but not limited to lycotoxin-1 peptides and mutants thereof (U.S. Pat. No. 8,334,366).

[0023] In some embodiments the PtIP-83 polypeptide include amino acid sequences deduced from the full-length nucleic acid sequences disclosed herein and amino acid sequences that are shorter than the full-length sequences, either due to the use of an alternate downstream start site or due to processing that produces a shorter protein having pesticidal activity. Processing may occur in the organism the protein is expressed in or in the pest after ingestion of the protein.

[0024] Thus, provided herein are novel isolated or recombinant nucleic acid sequences that confer pesticidal activity. Also provided are the amino acid sequences of PtIP-83 polypeptides. The protein resulting from translation of these PtIP-83 polypeptide genes allows cells to control or kill pests that ingest it.

### Nucleic Acid Molecules, and Variants and Fragments Thereof

[0025] One aspect pertains to isolated or recombinant nucleic acid molecules comprising nucleic acid sequences encoding PtIP-83 polypeptides or biologically active portions thereof, as well as nucleic acid molecules sufficient for use as hybridization probes to identify nucleic acid molecules encoding proteins with regions of sequence homology. As used herein, the term “nucleic acid molecule” refers to DNA molecules (e.g., recombinant DNA, cDNA, genomic DNA, plastid DNA, mitochondrial DNA) and RNA molecules (e.g., mRNA) and analogs of the DNA or RNA generated using nucleotide analogs. The nucleic acid molecule can be single-stranded or double-stranded, but preferably is double-stranded DNA.

[0026] An “isolated” nucleic acid molecule (or DNA) is used herein to refer to a nucleic acid sequence (or DNA) that is no longer in its natural environment, for example in vitro. A “recombinant” nucleic acid molecule (or DNA) is used herein to refer to a nucleic acid sequence (or DNA) that is in a recombinant bacterial or plant host cell. In some embodiments, an “isolated” or “recombinant” nucleic acid is free of sequences (preferably protein encoding sequences) that naturally flank the nucleic acid (i.e., sequences located at the 5′ and 3′ ends of the nucleic acid) in the genomic DNA of the organism from which the nucleic acid is derived. For purposes of the disclosure, “isolated” or “recombinant” when used to refer to nucleic acid molecules excludes isolated chromosomes. For example, in various embodiments, the recombinant nucleic acid molecule encoding PtIP-83 polypeptides can contain less than about 5 kb, 4 kb, 3 kb, 2 kb, 1 kb, 0.5 kb or 0.1 kb of nucleic acid sequences that naturally flank the nucleic acid molecule in genomic DNA of the cell from which the nucleic acid is derived.

[0027] In some embodiments an isolated nucleic acid molecule encoding PtIP-83 polypeptides has one or more change in the nucleic acid sequence compared to the native or genomic nucleic acid sequence. In some embodiments the change in the native or genomic nucleic acid sequence includes but is not limited to: changes in the nucleic acid sequence due to the degeneracy of the genetic code; changes in the nucleic acid sequence due to the amino acid substitution, insertion, deletion and/or addition compared to the native or genomic sequence; removal of one or more intron; deletion of one or more upstream or downstream regulatory regions; and deletion of the 5′ and/or 3′ untranslated region associated with the genomic nucleic acid sequence. In some embodiments the nucleic acid molecule encoding a PtIP-83 polypeptide is a non-genomic sequence.

[0028] A variety of polynucleotides that encode PtIP-83 polypeptides or related proteins are contemplated. Such polynucleotides are useful for production of PtIP-83 polypeptides in host cells when operably linked to suitable promoter, transcription termination and/or polyadenylation sequences. Such polynucleotides are also useful as probes for isolating homologous or substantially homologous polynucleotides that encode PtIP-83 polypeptides or related proteins.

### Polynucleotides Encoding PtIP-83 Polypeptides

[0029] One source of polynucleotides that encode PtIP-83 polypeptides or related proteins is a fern or other primitive plant species which contains a PtIP-83 polynucleotide of SEQ ID NO: 2, SEQ ID NO: 4, SEQ ID NO: 6, SEQ ID NO: 8, SEQ ID NO: 10, SEQ ID NO: 12, SEQ ID NO: 14, SEQ ID NO: 16, SEQ ID NO: 18, SEQ ID NO: 20, SEQ ID NO: 22, SEQ ID NO: 24, SEQ ID NO: 717, SEQ ID NO: 738, SEQ ID NO: 739, SEQ ID NO: 740, SEQ ID NO: 741, SEQ ID NO: 742, SEQ ID NO: 743, SEQ ID NO: 744, SEQ ID NO: 745, SEQ ID NO: 746, SEQ ID NO: 747, SEQ ID NO: 748, SEQ ID NO: 749, SEQ ID NO: 750, SEQ ID NO: 751, SEQ ID NO: 752 or SEQ ID NO: 753, encoding a PtIP-83 polypeptide of SEQ ID NO: 1, SEQ ID NO: 3, SEQ ID NO: 5, SEQ ID NO: 7, SEQ ID NO: 9, SEQ ID NO: 11, SEQ ID NO: 13, SEQ ID NO: 15, SEQ ID NO: 17, SEQ ID NO: 19, SEQ ID NO: 21, SEQ ID NO: 23, SEQ ID NO: 716, SEQ ID NO: 754, SEQ ID NO: 755, SEQ ID NO: 756, SEQ ID NO: 757, SEQ ID NO: 758, SEQ ID NO: 759, SEQ ID NO: 760, SEQ ID NO: 761, SEQ ID NO: 762, SEQ ID NO: 763, SEQ ID NO: 764, SEQ ID NO: 765, SEQ ID NO: 766, SEQ ID NO: 767, SEQ ID NO: 768 or SEQ ID NO: 769. The polynucleotides of SEQ ID NO: 2, SEQ ID NO: 4, SEQ ID NO: 6, SEQ ID NO: 8, SEQ ID NO: 10, SEQ ID NO: 12, SEQ ID NO: 14, SEQ ID NO: 16, SEQ ID NO: 18, SEQ ID NO: 20, SEQ ID NO: 22, SEQ ID NO: 24, SEQ ID NO: 717, SEQ ID NO: 738, SEQ ID NO: 739, SEQ ID NO: 740, SEQ ID NO: 741, SEQ ID NO: 742, SEQ ID NO: 743, SEQ ID NO: 744, SEQ ID NO: 745, SEQ ID NO: 746, SEQ ID NO: 747, SEQ ID NO: 748, SEQ ID NO: 749, SEQ ID NO: 750, SEQ ID NO: 751, SEQ ID NO: 752 and SEQ ID NO: 753 can be used to express PtIP-83 polypeptides in bacterial hosts that include but are not limited to Agrobacterium, Bacillus, Escherichia, Salmonella, Pseudomonas and Rhizobium bacterial host cells. The polynucleotides are also useful as probes for isolating homologous or substantially homologous polynucleotides that encode PtIP-83 polypeptides or related proteins. Such probes can be used to identify homologous or substantially homologous polynucleotides derived from Pteridophyta species.

[0030] Polynucleotides that encode PtIP-83 polypeptides can also be synthesized de novo from a PtIP-83 polypeptide sequence. The sequence of the polynucleotide gene can be deduced from a PtIP-83 polypeptide sequence through use of the genetic code. Computer programs such as “BackTranslate” (GCG™ Package, Acclerys, Inc. San Diego, Calif.) can be used to convert a peptide sequence to the corresponding nucleotide sequence encoding the peptide. Examples of PtIP-83 polypeptide sequences that can be used to obtain corresponding nucleotide encoding sequences include, but are not limited to the PtIP-83 polypeptides of SEQ ID NO: 1, SEQ ID NO: 3, SEQ ID NO: 5, SEQ ID NO: 7, SEQ ID NO: 9, SEQ ID NO: 11, SEQ ID NO: 13, SEQ ID NO: 15, SEQ ID NO: 17, SEQ ID NO: 19, SEQ ID NO: 21, SEQ ID NO: 23, SEQ ID NO: 716, SEQ ID NO: 754, SEQ ID NO: 755, SEQ ID NO: 756, SEQ ID NO: 757, SEQ ID NO: 758, SEQ ID NO: 759, SEQ ID NO: 760, SEQ ID NO: 761, SEQ ID NO: 762, SEQ ID NO: 763, SEQ ID NO: 764, SEQ ID NO: 765, SEQ ID NO: 766, SEQ ID NO: 767, SEQ ID NO: 768, and SEQ ID NO: 769. Furthermore, synthetic PtIP-83 polynucleotide sequences of the disclosure can be designed so that they will be expressed in plants. U.S. Pat. No. 5,500,365 describes a method for synthesizing plant genes to improve the expression level of the protein encoded by the synthesized gene. This method relates to the modification of the structural gene sequences of the exogenous transgene, to cause them to be more efficiently transcribed, processed, translated and expressed by the plant. Features of genes that are expressed well in plants include elimination of sequences that can cause undesired intron splicing or polyadenylation in the coding region of a gene transcript while retaining substantially the amino acid sequence of the toxic portion of the insecticidal protein. A similar method for obtaining enhanced expression of transgenes in monocotyledonous plants is disclosed in U.S. Pat. No. 5,689,052.

[0031] In some embodiments the nucleic acid molecule encoding a PtIP-83 polypeptide is a polynucleotide having the sequence set forth in SEQ ID NO: 2, SEQ ID NO: 4, SEQ ID NO: 6, SEQ ID NO: 8, SEQ ID NO: 10, SEQ ID NO: 12, SEQ ID NO: 14, SEQ ID NO: 16, SEQ ID NO: 18, SEQ ID NO: 20, SEQ ID NO: 22, SEQ ID NO: 24, SEQ ID NO: 717, SEQ ID NO: 738, SEQ ID NO: 739, SEQ ID NO: 740, SEQ ID NO: 741, SEQ ID NO: 742, SEQ ID NO: 743, SEQ ID NO: 744, SEQ ID NO: 745, SEQ ID NO: 746, SEQ ID NO: 747, SEQ ID NO: 748, SEQ ID NO: 749, SEQ ID NO: 750, SEQ ID NO: 751, SEQ ID NO: 752, SEQ ID NO: 753, and variants, fragments and complements thereof. “Complement” is used herein to refer to a nucleic acid sequence that is sufficiently complementary to a given nucleic acid sequence such that it can hybridize to the given nucleic acid sequence to thereby form a stable duplex. “Polynucleotide sequence variants” is used herein to refer to a nucleic acid sequence that except for the degeneracy of the genetic code encodes the same polypeptide.

[0032] In some embodiments the nucleic acid molecule encoding the PtIP-83 polypeptide is a non-genomic nucleic acid sequence. As used herein a “non-genomic nucleic acid sequence” or “non-genomic nucleic acid molecule” or “non-genomic polynucleotide” refers to a nucleic acid molecule that has one or more change in the nucleic acid sequence compared to a native or genomic nucleic acid sequence. In some embodiments the change to a native or genomic nucleic acid molecule includes but is not limited to: changes in the nucleic acid sequence due to the degeneracy of the genetic code; codon optimization of the nucleic acid sequence for expression in plants; changes in the nucleic acid sequence to introduce at least one amino acid substitution, insertion, deletion and/or addition compared to the native or genomic sequence; removal of one or more intron associated with the genomic nucleic acid sequence; insertion of one or more heterologous introns; deletion of one or more upstream or downstream regulatory regions associated with the genomic nucleic acid sequence; insertion of one or more heterologous upstream or downstream regulatory regions; deletion of the 5′ and/or 3′ untranslated region associated with the genomic nucleic acid sequence; insertion of a heterologous 5′ and/or 3′ untranslated region; and modification of a polyadenylation site. In some embodiments the non-genomic nucleic acid molecule is a cDNA. In some embodiments the non-genomic nucleic acid molecule is a synthetic nucleic acid sequence.

[0033] In some embodiments the nucleic acid molecule encoding a PtIP-83 polypeptide is a the non-genomic polynucleotide having a nucleotide sequence having at least 50%, 51%, 52%, 53%, 54%, 55%, 56%, 57%, 58%, 59%, 60%, 61%, 62%, 63%, 64%, 65%, 66%, 67%, 68%, 69%, 70%, 71%, 72%, 73%, 74%, 75%, 76%, 77%, 78%, 79%, 80%, 81%, 82%, 83%, 84%, 85%, 86%, 87%, 88%, 89%, 90%, 91%, 92%, 93%, 94%, 95%, 96%, 97%, 98% or 99% identity, to the nucleic acid sequence of SEQ ID NO: 2, SEQ ID NO: 4, SEQ ID NO: 6, SEQ ID NO: 8, SEQ ID NO: 10, SEQ ID NO: 12, SEQ ID NO: 14, SEQ ID NO: 16, SEQ ID NO: 18, SEQ ID NO: 20, SEQ ID NO: 22, SEQ ID NO: 24, SEQ ID NO: 717, SEQ ID NO: 738, SEQ ID NO: 739, SEQ ID NO: 740, SEQ ID NO: 741, SEQ ID NO: 742, SEQ ID NO: 743, SEQ ID NO: 744, SEQ ID NO: 745, SEQ ID NO: 746, SEQ ID NO: 747, SEQ ID NO: 748, SEQ ID NO: 749, SEQ ID NO: 750, SEQ ID NO: 751, SEQ ID NO: 752 or SEQ ID NO: 753, wherein the PtIP-83 polypeptide has insecticidal activity.

[0034] In some embodiments the non-genomic polynucleotide is not the nucleic acid sequence of SEQ ID NO: 2, SEQ ID NO: 4, SEQ ID NO: 6, SEQ ID NO: 8, SEQ ID NO: 10, SEQ ID NO: 12, SEQ ID NO: 14, SEQ ID NO: 16, SEQ ID NO: 18, SEQ ID NO: 20, SEQ ID NO: 22, SEQ ID NO: 24, SEQ ID NO: 717, SEQ ID NO: 738, SEQ ID NO: 739, SEQ ID NO: 740, SEQ ID NO: 741, SEQ ID NO: 742, SEQ ID NO: 743, SEQ ID NO: 744, SEQ ID NO: 745, SEQ ID NO: 746, SEQ ID NO: 747, SEQ ID NO: 748, SEQ ID NO: 749, SEQ ID NO: 750, SEQ ID NO: 751, SEQ ID NO: 752 or SEQ ID NO: 753.

[0035] In some embodiments the nucleic acid molecule encodes a PtIP-83 polypeptide comprising an amino acid sequence having at least 40%, 45%, 50%, 51%, 52%, 53%, 54%, 55%, 56%, 57%, 58%, 59%, 60%, 61%, 62%, 63%, 64%, 65%, 66%, 67%, 68%, 69%, 70%, 71%, 72%, 73%, 74%, 75%, 76%, 77%, 78%, 79%, 80%, 81%, 82%, 83%, 84%, 85%, 86%, 87%, 88%, 89%, 90%, 91%, 92%, 93%, 94%, 95%, 96%, 97%, 98% or 99% identity to the amino acid sequence of SEQ ID NO: 1, SEQ ID NO: 3, SEQ ID NO: 5, SEQ ID NO: 7, SEQ ID NO: 9, SEQ ID NO: 11, SEQ ID NO: 13, SEQ ID NO: 15, SEQ ID NO: 17, SEQ ID NO: 19, SEQ ID NO: 21, SEQ ID NO: 23, SEQ ID NO: 716, SEQ ID NO: 754, SEQ ID NO: 755, SEQ ID NO: 756, SEQ ID NO: 757, SEQ ID NO: 758, SEQ ID NO: 759, SEQ ID NO: 760, SEQ ID NO: 761, SEQ ID NO: 762, SEQ ID NO: 763, SEQ ID NO: 764, SEQ ID NO: 765, SEQ ID NO: 766, SEQ ID NO: 767, SEQ ID NO: 768 or SEQ ID NO: 769, wherein the PtIP-83 polypeptide has insecticidal activity.

[0036] In some embodiments the nucleic acid molecule encodes a PtIP-83 polypeptide comprising an amino acid sequence of SEQ ID NO: 1, SEQ ID NO: 3, SEQ ID NO: 5, SEQ ID NO: 7, SEQ ID NO: 9, SEQ ID NO: 11, SEQ ID NO: 13, SEQ ID NO: 15, SEQ ID NO: 17, SEQ ID NO: 19, SEQ ID NO: 21, SEQ ID NO: 23, SEQ ID NO: 716, SEQ ID NO: 754, SEQ ID NO: 755, SEQ ID NO: 756, SEQ ID NO: 757, SEQ ID NO: 758, SEQ ID NO: 759, SEQ ID NO: 760, SEQ ID NO: 761, SEQ ID NO: 762, SEQ ID NO: 763, SEQ ID NO: 764, SEQ ID NO: 765, SEQ ID NO: 766, SEQ ID NO: 767, SEQ ID NO: 768 or SEQ ID NO: 769, having 1, 2, 3, 4, 5, 6, 7, 8, 9, 10 11, 12, 13, 14, 15, 16, 17, 18, 19, 20, 21, 22, 23, 24, 25, 26, 27, 28, 29, 30, 31, 32, 33, 34, 35, 36, 37, 38, 39, 40, 41, 42, 43, 44, 45, 46, 47, 48, 49, 50, 51, 52, 53, 54, 55, 56, 57, 58, 59, 60, 61, 62, 63, 64, 65, 66, 67, 68, 69, 70 or more amino acid substitutions compared to the native amino acid at the corresponding position of SEQ ID NO: 1, SEQ ID NO: 3, SEQ ID NO: 5, SEQ ID NO: 7, SEQ ID NO: 9, SEQ ID NO: 11, SEQ ID NO: 13, SEQ ID NO: 15, SEQ ID NO: 17, SEQ ID NO: 19, SEQ ID NO: 21, SEQ ID NO: 23, SEQ ID NO: 716, SEQ ID NO: 754, SEQ ID NO: 755, SEQ ID NO: 756, SEQ ID NO: 757, SEQ ID NO: 758, SEQ ID NO: 759, SEQ ID NO: 760, SEQ ID NO: 761, SEQ ID NO: 762, SEQ ID NO: 763, SEQ ID NO: 764, SEQ ID NO: 765, SEQ ID NO: 766, SEQ ID NO: 767, SEQ ID NO: 768 or SEQ ID NO: 769.

[0037] In some embodiments the nucleic acid molecule encodes a PtIP-83 polypeptide comprising an amino acid sequence of any one of SEQ ID NO: 236-299, SEQ ID NO: 334-367, SEQ ID NO: 398-427, SEQ ID NO: 518-607, SEQ ID NO: 640-645, and SEQ ID NO: 728-737.

[0038] In some embodiments the nucleic acid molecule encoding the PtIP-83 polypeptide is any one of SEQ ID NO: 172-235, SEQ ID NO: 300-333, SEQ ID NO: 368-397, SEQ ID NO: 428-517, SEQ ID NO: 634-639, and SEQ ID NO: 718-727.

[0039] In some embodiments the nucleic acid molecule encodes a PtIP-83 polypeptide variant of SEQ ID NO: 1, wherein the amino acid at position 53 is Val, Ala, Cys or Thr; the amino acid at position 54 is Lys, Ala, Cys, Asp, Glu, Gly, His, Ile, Leu, Met, Asn, Gin, Arg, Ser or Thr; the amino acid at position 55 is Arg, Ala, Asp, Glu, Phe, Gly, His, Lys, Leu, Met, Asn, Gln, Ser, Thr, Val, Trp or Tyr; the amino acid at position 56 is Leu, Glu, Phe, Ile, Met, Thr or Val; the amino acid at position 57 is Tyr, Cys, Ile, Leu, Met, Thr or Val; the amino acid at position 58 is Val, Cys, Ile or Leu; the amino acid at position 59 is Phe, Leu, Met, Val or Tyr; the amino acid at position 60 is Ala, Cys, Gly, Ser, Thr or Val; the amino acid at position 61 is Asp, Glu, His or Ser; the amino acid at position 62 is Val, Ala, Cys, Ile, Leu or Thr; the amino acid at position 63 is Val, Ala, Cys, Ile, Leu, Met or Thr; the amino acid at position 64 is Glu, Ala, Cys, Phe, Gly, His, Ile, Leu, Met, Asn, Gln, Arg, Ser, Thr, Val, Trp or Tyr; the amino acid at position 65 is Leu, Ala, Cys, Phe, His, Ile, Met, Asn, Gln, Thr, Val or Trp; the amino acid at position 66 is Pro, Asp, Gly, Met, Gln or Arg; the amino acid at position 363 is Gln, Ala, Cys, Glu, Phe, Gly, His, Lys, Leu, Asn, Arg, Ser, Thr, Val or Trp; the amino acid at position 364 is Ile, Ala, Cys, Glu, Phe, His, Lys, Leu, Met, Asn, Gln, Ser, Thr, Val, Trp or Tyr; the amino acid at position 365 is Leu, Ala, Glu, Phe, Gly, His, Ile, Lys, Met, Asn, Arg, Val, Trp or Tyr; the amino acid at position 366 is Gly, Ala, Cys, Phe, His, Ile, Lys, Leu, Met, Asn, Ser, Thr or Val; the amino acid at position 367 is Ser, Ala, Cys, Asp, Glu, Phe, Gly, His, Ile, Leu, Met, Asn, Pro, Gln, Arg, Thr, Val or Trp; the amino acid at position 368 is Tyr, Ala, Cys, Asp, Glu, Phe, Gly, His, Ile, Lys, Leu, Met, Asn, Pro, Gln, Arg, Ser, Thr, Val or Trp; the amino acid at position 369 is Leu, Ala, Cys, Asp, Phe, Gly, Ile, Met, Thr or Val; the amino acid at position 370 is Leu, Ala, Cys, Asp, Glu, Phe, Gly, His, Ile, Lys, Met, Gin, Arg, Ser, Thr, Val, Trp or Tyr; the amino acid at position 371 is Gln, Ala, Cys, Asp, Glu, Phe, Gly, Ile, Lys, Leu, Asn, Arg, Ser, Thr, Val or Trp; the amino acid at position 372 is Gln, Ala, Cys, Asp, Phe, Gly, His, Ile, Leu, Asn, Arg, Ser, Val or Tyr; the amino acid at position 373 is Asn, Ala, Cys, Asp, Phe, Gly, His, Ile, Lys, Gln, Ser, Thr, Val or Trp; the amino acid at position 556 is Trp, Phe, Thr or Tyr; the amino acid at position 557 is Arg, Cys, Asp, Gly, His, Ile, Lys, Leu, Met, Asn, Pro, Gln, Ser, Thr, Val, Trp or Tyr; the amino acid at position 558 is Ala, Cys, Asp, Phe, Gly, His, Ile, Lys, Leu, Asn, Pro, Gln, Arg, Ser, Val, Trp or Tyr; the amino acid at position 559 is Lys, Ala, Cys, Phe, Gly, His, Ile, Leu, Asn, Gln, Arg, Ser, Thr, Val or Tyr; the amino acid at position 560 is Cys, Ala, Phe, Gly, Ile, Met, Asn, Arg, Ser, Thr or Val; the amino acid at position 561 is Lys, Ala, Cys, Asp, Glu, Phe, Gly, His, Ile, Leu, Met, Asn, Arg, Ser, Thr, Val or Tyr; the amino acid at position 562 is Asn, Cys, Asp, Glu, Gly, His, Leu, Met, Arg, Ser, Thr, Val or Tyr; the amino acid at position 563 is Val, Ala, Cys, Asp, Phe, His, Ile, Leu, Met, Asn, Gin, Thr or Trp; the amino acid at position 564 is Ala, Cys, Gly, Met, Gln, Ser, Thr, Val, Trp or Tyr; the amino acid at position 646 is Leu, Ala, Cys, Gly, Ile, Met, Asn, Gln, Ser, Thr or Val; the amino acid at position 647 is Leu, Asp, Gly, Met, Asn, Gln or Thr; the amino acid at position 648 is Met, Ala, Cys, Asp, Glu, Phe, Gly, His, Lys, Leu, Asn, Pro, Gin, Arg, Ser, Thr, Val, Trp or Tyr; the amino acid at position 649 is Pro, Ala, Cys, Asp, Glu, Phe, Gly, His, Lys, Met, Asn, Gln, Arg, Ser, Thr, Trp or Tyr; the amino acid at position 650 is Thr, Ala, Cys, Asp, Phe, Gly, His, Ile, Lys, Leu, Met, Pro, Gln, Arg, Ser, Val or Tyr; the amino acid at position 651 is Glu, Ala, Cys, Asp, Gly, His, Ile, Leu, Met, Asn, Pro, Gln, Arg, Ser, Thr, Val or Tyr; the amino acid at position 652 is Leu, Cys, Phe, Ile, Lys, Met, Pro, Arg, Ser, Thr or Val; the amino acid at position 653 is Thr, Cys, Asp, Glu, Phe, Gly, His, Ile, Lys, Leu, Pro, Arg, Ser, Val or Trp; the amino acid at position 654 is Thr, Ala, Cys, Phe, Ile, Lys, Leu, Met, Pro, Arg, Ser, Val, Trp or Tyr; the amino acid at position 655 is Trp, Phe or Tyr; the amino acid at position 771 is Arg, Ala, Asp, Glu, Phe, Gly, His, Ile, Lys, Leu, Asn, Ser, Thr, Val, Trp or Tyr; the amino acid at position 772 is Arg, Ala, Cys, Asp, Glu, Phe, Gly, His, Ile, Lys, Leu, Met, Pro, Gln, Ser, Thr, Val, Trp or Tyr; the amino acid at position 773 is Asp, Ala, Glu, Phe, Gly, His, Ile, Lys, Leu, Met, Asn, Gln, Arg, Ser, Thr, Val, Trp or Tyr; the amino acid at position 774 is Gin, Ala, Asp, Gly, His, Ile, Lys, Leu, Met, Asn, Pro, Arg, Ser, Thr, Val, Trp or Tyr; the amino acid at position 775 is Val, Ala, Cys, Asp, Glu, Gly, His, Ile, Asn, Pro, Gln, Arg, Ser, Thr or Tyr; the amino acid at position 776 is Leu, Ala, Cys, Asp, Glu, Phe, Gly, His, Ile, Lys, Asn, Pro, Gln, Arg, Ser, Thr, Val or Tyr; the amino acid at position 777 is Pro, Ala, Cys, Asp, Glu, Phe, Gly, His, Lys, Leu, Met, Asn, Gln, Ser, Thr, Val, Trp or Tyr; the amino acid at position 778 is Phe, Ala, His, Ile, Leu, Met, Asn, Gln, Ser, Val, Trp or Tyr; the amino acid at position 779 is Gln, Ala, Cys, Asp, Glu, Gly, His, Lys, Leu, Asn, Pro, Arg, Ser, Thr or Val; the amino acid at position 780 is Ala, Cys, Asn, Pro, Gln or Ser; the amino acid at position 781 is Ala, Cys, Asp, Glu, Phe, Gly, His, Ile, Asn, Gln, Arg, Ser, Thr, Val, Trp or Tyr; the amino acid at position 782 is Ala, Cys, Asp, Glu, Phe, Gly, His, Ile, Lys, Met, Pro, Gln, Arg, Ser, Thr, Val, Trp or Tyr; the amino acid at position 783 is Pro, Ala, Cys, Asp, Glu, Gly, His, Asn, Gln, Arg, Ser, Thr or Val; the amino acid at position 784 is Leu, Ala, Glu, Phe, His, Ile, Lys, Met, Asn, Pro, Gln, Ser, Thr, Val or Trp; the amino acid at position 785 is Asn, Ala, Cys, Glu, Phe, Gly, His, Ile, Lys, Leu, Met, Gln, Arg, Ser, Thr, Val, Trp or Tyr; and the amino acid at position 786 is Tyr, Phe, Ile, Leu or Trp.

[0040] In some embodiments the nucleic acid molecule encodes a PtIP-83 polypeptide variant of SEQ ID NO: 1, wherein the amino acid at position 1 is Met or deleted; the amino acid at position 2 is Ala or deleted; the amino acid at position 3 is Leu, Val or deleted; the amino acid at position 4 is Val, Met or Leu; the amino acid at position 7 is Gly or Ser; the amino acid at position 8 is Lys or Thr; the amino acid at position 10 is Phe or Tyr; the amino acid at position 11 is Glu or Arg; the amino acid at position 18 is Met or Ile; the amino acid at position 19 is Gly, Pro or Ala; the amino acid at position 20 is Val or deleted; the amino acid at position 21 is Leu or Val; the amino acid at position 23 is Arg or Gln; the amino acid at position 37 is Val or Leu; the amino acid at position 38 is Arg or Asn; the amino acid at position 40 is Ala or Ser; the amino acid at position 43 is Asn or Asp; the amino acid at position 45 is Gly or Ala; the amino acid at position 46 is Gln or Glu; the amino acid at position 48 is Glu, Pro or Val; the amino acid at position 51 is Glu or Gly; the amino acid at position 52 is Lys, Arg or Thr; the amino acid at position 56 is Leu or Val; the amino acid at position 59 is Phe or Leu; the amino acid at position 66 is Pro or Ala; the amino acid at position 67 is Val, Pro or Thr; the amino acid at position 68 is Val, Arg, Phe or Gly; the amino acid at position 69 is Glu, Ala or Lys; the amino acid at position 70 is Trp, Thr, His, Tyr or Arg; the amino acid at position 71 is Arg, Pro or deleted; the amino acid at position 72 is Trp, Asp, Leu or deleted; the amino acid at position 73 is Pro, Gln, Asn, His or deleted; the amino acid at position 74 is Pro, Met or Thr; the amino acid at position 75 is Gln, His or Arg; the amino acid at position 76 is Ile, Met or Leu; the amino acid at position 84 is Ile or Val; the amino acid at position 91 is Trp or Phe; the amino acid at position 93 is Thr or Ile; the amino acid at position 94 is Asp or Gly; the amino acid at position 96 is Arg or Ser; the amino acid at position 97 is Gln, Phe or Arg; the amino acid at position 98 is Ser or deleted; the amino acid at position 99 is Asp or Ala; the amino acid at position 100 is Thr or Ala; the amino acid at position 101 is Glu, Thr or Trp the amino acid at position 103 is His, Arg, Glu or Gln; the amino acid at position 105 is Thr or Pro; the amino acid at position 108 is Lys, Gin or Glu; the amino acid at position 109 is Leu or Val; the amino acid at position 111 is Ala or Thr; the amino acid at position 112 is Ile, Arg, Thr or deleted; the amino acid at position 113 is Gln, Ala, Gly or deleted; the amino acid at position 114 is Arg, Glu or Ile; the amino acid at position 115 is Glu or Gln; the amino acid at position 116 is Glu, Asn, Gin or Arg; the amino acid at position 117 is Asn, Val, Tyr or Phe; the amino acid at position 118 is Arg or Lys; the amino acid at position 119 is Trp or Ser; the amino acid at position 122 is Thr, Lys or Ala; the amino acid at position 124 is Ala or Thr; the amino acid at position 126 is Gly or Asp; the amino acid at position 127 is Met or Ala; the amino acid at position 128 is Asn or Lys; the amino acid at position 131 is Val, Ile or Thr; the amino acid at position 133 is Ile or Val; the amino acid at position 134 is His or Tyr; the amino acid at position 135 is Ala or Gly; the amino acid at position 137 is Glu or Lys; the amino acid at position 139 is Gln or Glu; the amino acid at position 140 is Val, Arg or Leu; the amino acid at position 141 is Gly or Ser; the amino acid at position 142 is Val or Pro; the amino acid at position 144 is Thr, Leu, Phe or Tyr; the amino acid at position 145 is Met, Pro or Asn; the amino acid at position 146 is Ser, Gly or Asn; the amino acid at position 147 is Trp or Asn; the amino acid at position 148 is Ser, Ala or Pro; the amino acid at position 149 is Ser or deleted; the amino acid at position 150 is Val, Ile or Tyr; the amino acid at position 152 is Arg, Ala, Val or Gly; the amino acid at position 154 is Ser, Trp or Glu; the amino acid at position 156 is Leu, Asp or Gln; the amino acid at position 158 is Ser or Cys; the amino acid at position 159 is Val, Thr or Ile; the amino acid at position 162 is Ser or Ala; the amino acid at position 163 is Gly or deleted; the amino acid at position 164 is Phe or deleted; the amino acid at position 165 is Arg or Ala; the amino acid at position 166 is Ala, Arg, Met or Phe; the amino acid at position 167 is Val or His; the amino acid at position 168 is Ser or Asn; the amino acid at position 169 is Val, His or Thr; the amino acid at position 170 is Phe or Val; the amino acid at position 171 is Glu, Asn or Asp; the amino acid at position 172 is Val, Ala, Arg or Glu; the amino acid at position 175 is Ser, Arg or Trp; the amino acid at position 176 is Val or Ile; the amino acid at position 177 is Arg or Ile; the amino acid at position 179 is Thr, Ile, Val or Ser; the amino acid at position 180 is Leu, Phe or Thr; the amino acid at position 181 is Gly, Thr, Gln or Ser; the amino acid at position 182 is Ala, Leu, Phe or Ile; the amino acid at position 183 is Thr or Gly; the amino acid at position 184 is Leu, Thr, Ser or Arg; the amino acid at position 185 is Arg, Gly, Asp or Ala; the amino acid at position 186 is Pro, Val or Gln; the amino acid at position 187 is Asp, Thr or Ser; the amino acid at position 188 is His, Gly or Ala; the amino acid at position 189 is Ala, Arg, Pro or deleted; the amino acid at position 190 is Leu, Asn or deleted; the amino acid at position 191 is Tyr or deleted; the amino acid at position 192 is Ser, Ile, Val or Asn; the amino acid at position 193 is Thr or Asp; the amino acid at position 194 is Thr or Ser; the amino acid at position 195 is Met or Thr; the amino acid at position 196 is Gln, His, Leu or Ser; the amino acid at position 197 is Ala, Gly or Leu; the amino acid at position 198 is Thr, Glu or Ala; the amino acid at position 199 is Pro or Arg; the amino acid at position 200 is Asn, Ser, Thr or Gly; the amino acid at position 201 is Ala, Leu, Glu or Trp; the amino acid at position 202 is Ser, Asp, Phe or Leu; the amino acid at position 203 is His, Pro, Gly or Ser; the amino acid at position 204 is Ile, Trp, His or Gly; the amino acid at position 205 is Ser, Asn or Ile; the amino acid at position 206 is Ala, Gly, Asp, Tyr or Arg; the amino acid at position 207 is Phe, Val or Leu; the amino acid at position 208 is Asn, Ser, Pro or Leu; the amino acid at position 210 is Arg, Asp, Glu or Tyr; the amino acid at position 211 is Ile, Ser or Thr; the amino acid at position 212 is Val, Ala or Asp; the amino acid at position 214 is Pro or Arg; the amino acid at position 215 is Ser or Thr; the amino acid at position 217 is Tyr or Phe; the amino acid at position 218 is Arg or Ser; the amino acid at position 219 is Val or Ala; the amino acid at position 220 is Cys, Leu or Ser; the amino acid at position 221 is Pro or His; the amino acid at position 222 is Leu, Arg or Ser; the amino acid at position 224 is Asn or Ser; the amino acid at position 225 is Asp, Arg or Thr; the amino acid at position 226 is Thr or Asn; the amino acid at position 227 is Asp, Leu or deleted; the amino acid at position 228 is Thr or deleted; the amino acid at position 229 is Tyr or deleted; the amino acid at position 230 is Leu or deleted; the amino acid at position 231 is Gly or deleted; the amino acid at position 232 is Ile or deleted; the amino acid at position 233 is Pro or deleted; the amino acid at position 234 is Ala, Pro or deleted; the amino acid at position 235 is Asp, Ile or Val; the amino acid at position 236 is Val, Ser or Glu; the amino acid at position 237 is Ala, Phe or Tyr; the amino acid at position 238 is Ala or Thr; the amino acid at position 239 is Val, Ser or Gly; the amino acid at position 240 is Leu or Ile; the amino acid at position 243 is Asp or Glu; the amino acid at position 249 is Asn or Ser; the amino acid at position 252 is Leu or Met; the amino acid at position 257 is Thr or Ser; the amino acid at position 259 is His or Leu; the amino acid at position 266 is Ala or Val; the amino acid at position 267 is Cys or Gly; the amino acid at position 268 is His, Arg or Tyr; the amino acid at position 272 is Asp or Glu; the amino acid at position 273 is Val, Met, Ile or Leu; the amino acid at position 274 is Val or Met; the amino acid at position 278 is Gly or Ala; the amino acid at position 279 is Glu or Val; the amino acid at position 281 is Leu or Ala; the amino acid at position 282 is Asn, Leu or Ile; the amino acid at position 285 is Asn or Ser; the amino acid at position 286 is Lys, Asp or Glu; the amino acid at position 287 is Leu or Val; the amino acid at position 290 is Pro, Gln or Arg; the amino acid at position 291 is Leu or Val; the amino acid at position 292 is Lys or Val; the amino acid at position 293 is Glu or Gln; the amino acid at position 294 is Ser, Asn or Lys; the amino acid at position 295 is Thr or Ser; the amino acid at position 296 is Gln or His; the amino acid at position 297 is Leu or Met; the amino acid at position 300 is Ser or Thr; the amino acid at position 301 is Glu or Ala; the amino acid at position 302 is Ser, Pro or Ala; the amino acid at position 304 is Lys or Asn; the amino acid at position 313 is Val or Ile; the amino acid at position 314 is His, Glu or Gln; the amino acid at position 315 is Ala, Cys or Ser; the amino acid at position 316 is Ala or Val; the amino acid at position 317 is Met or Ile; the amino acid at position 319 is Met or Ile; the amino acid at position 320 is Val or Gly; the amino acid at position 321 is Arg or Pro; the amino acid at position 322 is Ile or Phe; the amino acid at position 323 is Gly or Val; the amino acid at position 324 is Leu or Ser; the amino acid at position 336 is Ser or Asn; the amino acid at position 339 is Asn, Lys or Arg; the amino acid at position 350 is Arg or Gln; the amino acid at position 351 is Glu or Asp; the amino acid at position 353 is Lys or Arg; the amino acid at position 354 is Gln or Arg; the amino acid at position 355 is Phe or Leu; the amino acid at position 356 is Lys or Arg; the amino acid at position 360 is Ile, Val or Ala; the amino acid at position 365 is Leu or Phe; the amino acid at position 371 is or Glu; the amino acid at position 372 is or Lys; the amino acid at position 374 is Arg or Lys; the amino acid at position 376 is Phe or Leu; the amino acid at position 378 is Glu or Asp; the amino acid at position 381 is Leu or Val; the amino acid at position 388 is Ala or Ser; the amino acid at position 395 is Arg or Lys; the amino acid at position 396 is Glu, Gln or Gly; the amino acid at position 399 is Asp or Asn; the amino acid at position 400 is Asn, Thr or Asp; the amino acid at position 401 is Thr or Ala; the amino acid at position 402 is Phe, Ile or Leu; the amino acid at position 406 is Asp or Glu; the amino acid at position 408 is Leu or Met; the amino acid at position 410 is Gly or Leu; the amino acid at position 414 is Ala or Glu; the amino acid at position 416 is Ser, Asn or Asp; the amino acid at position 417 is Ser, Arg or Gly; the amino acid at position 423 is Lys or Gln; the amino acid at position 431 is Arg or Lys; the amino acid at position 432 is Gln or Glu; the amino acid at position 436 is Arg or Glu; the amino acid at position 440 is Asn or Arg; the amino acid at position 442 is Leu or Val; the amino acid at position 447 is Ser, Lys or Arg; the amino acid at position 448 is Ala or Ser; the amino acid at position 451 is Gln or Met; the amino acid at position 453 is Gly or Ala; the amino acid at position 455 is Ala or Val; the amino acid at position 457 is Leu or Val; the amino acid at position 467 is Val or Ala; the amino acid at position 471 is Gly or Ala; the amino acid at position 475 is Ser or Asn; the amino acid at position 483 is Gly or Ala; the amino acid at position 493 is Gln or Gly; the amino acid at position 504 is Val or Ile; the amino acid at position 506 is Asp or His; the amino acid at position 509 is Asp or Asn; the amino acid at position 510 is Ser or Ala; the amino acid at position 512 is Glu or Asp; the amino acid at position 515 is Gly or Ser; the amino acid at position 516 is Gln or His; the amino acid at position 517 is Ile or Leu; the amino acid at position 519 is Asp, Gly or Gln; the amino acid at position 522 is Val, Glu, Pro or Val; the amino acid at position 525 is Glu or Asp; the amino acid at position 526 is Leu or Met; the amino acid at position 539 is Val or Ile; the amino acid at position 555 is Val or Ala; the amino acid at position 557 is Arg or Lys; the amino acid at position 563 is Val or Met; the amino acid at position 571 is Ser or Cys; the amino acid at position 575 is Val or Glu; the amino acid at position 577 is Met or Ile; the amino acid at position 579 is Glu or Gln; the amino acid at position 583 is Asp or Glu; the amino acid at position 589 is Met or Leu; the amino acid at position 590 is Met or Leu; the amino acid at position 593 is Met or Ile; the amino acid at position 595 is Arg or Gln; the amino acid at position 596 is Ser or Thr; the amino acid at position 597 is Gln or His; the amino acid at position 607 is Ala or Val; the amino acid at position 608 is Asp or Asn; the amino acid at position 612 is Tyr, His or Phe; the amino acid at position 617 is Thr or Ile; the amino acid at position 618 is Gln or His; the amino acid at position 625 is Arg or Ser; the amino acid at position 626 is Met or Ile; the amino acid at position 628 is Leu or Ile; the amino acid at position 633 is Ile or Met; the amino acid at position 634 is Leu or Met; the amino acid at position 642 is Arg or Met; the amino acid at position 648 is Met or Thr; the amino acid at position 651 is Glu or Gln; the amino acid at position 654 is Thr, Val or Ala; the amino acid at position 658 is Gly or Arg; the amino acid at position 663 is Gly or Ala; the amino acid at position 664 is Asp or Asn; the amino acid at position 668 is Ala or Thr; the amino acid at position 669 is Gln or His; the amino acid at position 671 is Asn or Ser the amino acid at position 675 is Ile, Val or Ser; the amino acid at position 678 is Met, Ile, Ala or Thr; the amino acid at position 682 is Pro or Gln; the amino acid at position 683 is Ser or Pro; the amino acid at position 685 is Asp or Asn; the amino acid at position 694 is Asp or Gly; the amino acid at position 697 is Asn or Ser; the amino acid at position 704 is Glu or Gly; the amino acid at position 714 is Ala or Gly; the amino acid at position 721 is Ser or Phe; the amino acid at position 722 is Ser or Asn; the amino acid at position 724 is Ser or Thr; the amino acid at position 734 is His or Gln; the amino acid at position 736 is Val or Ala; the amino acid at position 737 is Lys or Gln; the amino acid at position 739 is Ala or Ser; the amino acid at position 740 is Ser or Met; the amino acid at position 741 is Gly or Asn; the amino acid at position 742 is Ile or Gly; the amino acid at position 743 is Gly or deleted; the amino acid at position 745 is Gly or Asp; the amino acid at position 751 is Thr, Ser or Ala; the amino acid at position 753 is Gln or Arg; the amino acid at position 754 is Thr or Ser; the amino acid at position 756 is Thr or Ile; the amino acid at position 757 is Val or Ile; the amino acid at position 766 is Ile or Val; the amino acid at position 773 is Asp or Glu; the amino acid at position 774 is Gln or Glu; the amino acid at position 776 is Leu or Met; the amino acid at position 777 is Pro or Thr; the amino acid at position 782 is Ala, Asp or Val; the amino acid at position 786 is Tyr or Phe; the amino acid at position 787 is His or Gln; the amino acid at position 788 is Tyr or Met; the amino acid at position 789 is Ala or Arg; the amino acid at position 790 is Tyr or Thr; the amino acid at position 791 is Arg or Ala; the amino acid at position 792 is Leu or Ser; the amino acid at position 796 is Asp or Glu; the amino acid at position 797 is Ser, Thr or Ala the amino acid at position 802 is Glu or Gln; the amino acid at position 806 is Gln, Asp, Glu or His; the amino acid at position 810 is Lys or Thr; the amino acid at position 819 is Arg or His; the amino acid at position 829 is Lys, Ser, Ala or Pro; the amino acid at position 832 is Ala, Lys or Glu; the amino acid at position 833 is Gly or Glu; the amino acid at position 842 is Leu or Pro; the amino acid at position 847 is Gln or Glu; the amino acid at position 848 is Ile or Val; the amino acid at position 849 is Val or Ala; the amino acid at position 855 is Thr or Met; the amino acid at position 860 is Ile or Val; and the amino acid at position 864 is His or Gln.

[0041] In some embodiments the nucleic acid molecule encodes a PtIP-83 polypeptide variant of SEQ ID NO: 1, wherein the amino acid at position 1 is Met or deleted; the amino acid at position 2 is Ala or deleted; the amino acid at position 3 is Leu, Val, Ile or deleted; the amino acid at position 4 is Val, Met, Ile or Leu; the amino acid at position 7 is Gly, Thr or Ser; the amino acid at position 8 is Lys, Arg, Ser or Thr; the amino acid at position 10 is Phe, Trp or Tyr; the amino acid at position 11 is Glu, Asp, Lys or Arg; the amino acid at position 18 is Met, Val, Leu or Ile; the amino acid at position 19 is Gly, Pro or Ala; the amino acid at position 20 is Val, Ile, Leu or deleted; the amino acid at position 21 is Leu, Ile or Val; the amino acid at position 23 is Arg, Lys, Asn or Gln; the amino acid at position 37 is Val, Ile or Leu; the amino acid at position 38 is Arg, Lys, Gln or Asn; the amino acid at position 40 is Ala, Gly, Thr or Ser; the amino acid at position 43 is Asn, Gln, Glu or Asp; the amino acid at position 45 is Gly or Ala; the amino acid at position 46 is Gln, Asp, Asn or Glu; the amino acid at position 48 is Glu, Asp, Pro, Ile, Leu or Val; the amino acid at position 51 is Glu, Asp, Ala or Gly; the amino acid at position 52 is Lys, Arg, Ser or Thr; the amino acid at position 56 is Leu, Ile or Val; the amino acid at position 59 is Phe, Ile, Val or Leu; the amino acid at position 66 is Pro, Gly or Ala; the amino acid at position 67 is Val, Pro, Ile, Leu, Ser or Thr; the amino acid at position 68 is Val, Arg, Phe, Ile, Leu, Lys or Gly; the amino acid at position 69 is Glu, Ala, Asp, Gly, Arg or Lys; the amino acid at position 70 is Trp, Thr, His, Tyr, Lys or Arg; the amino acid at position 71 is Arg, Pro, Lys or deleted; the amino acid at position 72 is Trp, Asp, Leu, Ile, Val, Glu or deleted; the amino acid at position 73 is Pro, Gln, Asn, His or deleted; the amino acid at position 74 is Pro, Met, Ser or Thr; the amino acid at position 75 is Gln, His, Asn, Lys or Arg; the amino acid at position 76 is Ile, Met, Val or Leu; the amino acid at position 84 is Ile, Leu or Val; the amino acid at position 91 is Trp or Phe; the amino acid at position 93 is Thr, Ser, Leu, Val or Ile; the amino acid at position 94 is Asp, Glu, Ala or Gly; the amino acid at position 96 is Arg, Lys, Thr or Ser; the amino acid at position 97 is Gln, Phe, Asn, Lys or Arg; the amino acid at position 98 is Ser, Thr or deleted; the amino acid at position 99 is Asp, Glu, Gly or Ala; the amino acid at position 100 is Thr, Ser, Gly or Ala; the amino acid at position 101 is Glu, Thr, Asp, Ser or Trp the amino acid at position 103 is His, Arg, Lys, Glu or Gln; the amino acid at position 105 is Thr, Ser or Pro; the amino acid at position 108 is Lys, Arg, Asn, Asp, Gln or Glu; the amino acid at position 109 is Leu, Ile or Val; the amino acid at position 111 is Ala, Ser or Thr; the amino acid at position 112 is Ile, Arg, Thr, Leu, Val, Lys, Ser or deleted; the amino acid at position 113 is Gln, Ala, Gly, Asn or deleted; the amino acid at position 114 is Arg, Glu, Lys, Asp or Ile; the amino acid at position 115 is Glu, Asp, Asn or Gln; the amino acid at position 116 is Glu, Asn, Gln, Asp, Lys or Arg; the amino acid at position 117 is Asn, Val, Tyr, Ile, Leu, Gln, Trp or Phe; the amino acid at position 118 is Arg or Lys; the amino acid at position 119 is Trp, Thr or Ser; the amino acid at position 122 is Thr, Lys, Ser, Arg or Ala; the amino acid at position 124 is Ala, Gly, Ser or Thr; the amino acid at position 126 is Gly, Ala, Glu or Asp; the amino acid at position 127 is Met, Gly or Ala; the amino acid at position 128 is Asn, Gln, Arg or Lys; the amino acid at position 131 is Val, Ile, Leu, Ser or Thr; the amino acid at position 133 is Ile, Leu or Val; the amino acid at position 134 is His or Tyr; the amino acid at position 135 is Ala or Gly; the amino acid at position 137 is Glu, Asp, Arg or Lys; the amino acid at position 139 is Gln, Asn, Asp or Glu; the amino acid at position 140 is Val, Arg, Ile, Lys or Leu; the amino acid at position 141 is Gly, Ala, Thr or Ser; the amino acid at position 142 is Val, Ile, Leu or Pro; the amino acid at position 144 is Thr, Leu, Phe, Ile, Val or Tyr; the amino acid at position 145 is Met, Pro, Gln or Asn; the amino acid at position 146 is Ser, Gly, Thr, Ala, Gln or Asn; the amino acid at position 147 is Trp, Gln, Tyr or Asn; the amino acid at position 148 is Ser, Ala, Thr, Gly or Pro; the amino acid at position 149 is Ser, Thr or deleted; the amino acid at position 150 is Val, Ile, Leu or Tyr; the amino acid at position 152 is Arg, Ala, Val, Ile, Leu, Lys or Gly; the amino acid at position 154 is Ser, Trp, Thr, Asp or Glu; the amino acid at position 156 is Leu, Asp, Ile, Val, Asn, Glu or Gln; the amino acid at position 158 is Ser, Thr or Cys; the amino acid at position 159 is Val, Thr, Leu or Ile; the amino acid at position 162 is Ser, Thr, Gly or Ala; the amino acid at position 163 is Gly, Ala or deleted; the amino acid at position 164 is Phe or deleted; the amino acid at position 165 is Arg, Lys, Gly or Ala; the amino acid at position 166 is Ala, Arg, Met, Lys or Phe; the amino acid at position 167 is Val, Ile, Leu or His; the amino acid at position 168 is Ser, Thr, Gln or Asn; the amino acid at position 169 is Val, His, Ile, Leu, Ser or Thr; the amino acid at position 170 is Phe, Ile, Leu or Val; the amino acid at position 171 is Glu, Asn, Gln or Asp; the amino acid at position 172 is Val, Ala, Arg, Ile, Leu, Gly, Lys, Asp or Glu; the amino acid at position 175 is Ser, Arg, Thr, Lys or Trp; the amino acid at position 176 is Val, Leu or Ile; the amino acid at position 177 is Arg, Lys, Leu, Val or Ile; the amino acid at position 179 is Thr, Ile, Val, Leu or Ser; the amino acid at position 180 is Leu, Phe, Ile, Val, Ser or Thr; the amino acid at position 181 is Gly, Thr, Gln, Asn or Ser; the amino acid at position 182 is Ala, Leu, Phe, Val or Ile; the amino acid at position 183 is Thr, Ser, Ala or Gly; the amino acid at position 184 is Leu, Thr, Ser, Ile, Val, Lys or Arg; the amino acid at position 185 is Arg, Gly, Asp, Lys, Glu or Ala; the amino acid at position 186 is Pro, Val, Ile, Leu, Asn or Gln; the amino acid at position 187 is Asp, Thr, Glu or Ser; the amino acid at position 188 is His, Gly or Ala; the amino acid at position 189 is Ala, Arg, Pro, Lys, Gly or deleted; the amino acid at position 190 is Leu, Asn, Ile, Val, Gln or deleted; the amino acid at position 191 is Tyr or deleted; the amino acid at position 192 is Ser, Ile, Val, Leu, Thr or Asn; the amino acid at position 193 is Thr, Ser, Glu or Asp; the amino acid at position 194 is Thr or Ser; the amino acid at position 195 is Met or Thr; the amino acid at position 196 is Gln, His, Leu, Asn, Ile, Val, Thr or Ser; the amino acid at position 197 is Ala, Gly, Ile, Val or Leu; the amino acid at position 198 is Thr, Glu, Ser, Asp, Gly or Ala; the amino acid at position 199 is Pro, Lys or Arg; the amino acid at position 200 is Asn, Ser, Thr, Gln, Ala or Gly; the amino acid at position 201 is Ala, Leu, Glu, Ile, Asp or Trp; the amino acid at position 202 is Ser, Asp, Phe, Ile, Val, Thr, Glu or Leu; the amino acid at position 203 is His, Pro, Gly, Ala, Thr or Ser; the amino acid at position 204 is Ile, Trp, His, Leu, Val, Ala or Gly; the amino acid at position 205 is Ser, Asn, Leu, Val, Thr, Gln or Ile; the amino acid at position 206 is Ala, Gly, Asp, Tyr, Glu, Lys or Arg; the amino acid at position 207 is Phe, Val, Ile or Leu; the amino acid at position 208 is Asn, Ser, Pro, Gln, Thr, Val, Ile or Leu; the amino acid at position 210 is Arg, Asp, Glu, Lys, Ser or Tyr; the amino acid at position 211 is Ile, Ser, Leu, Val or Thr; the amino acid at position 212 is Val, Ala, Ile, Leu, Glu, Gly or Asp; the amino acid at position 214 is Pro, Lys or Arg; the amino acid at position 215 is Ser or Thr; the amino acid at position 217 is Tyr or Phe; the amino acid at position 218 is Arg, Lys, Thr or Ser; the amino acid at position 219 is Val, Ile, Leu or Ala; the amino acid at position 220 is Cys, Leu, Ile, Val, Thr or Ser; the amino acid at position 221 is Pro or His; the amino acid at position 222 is Leu, Arg, Lys, Ile, Val, Thr or Ser; the amino acid at position 224 is Asn, Gln, Thr or Ser; the amino acid at position 225 is Asp, Arg, Glu, Lys, Ser or Thr; the amino acid at position 226 is Thr, Ser, Gln or Asn; the amino acid at position 227 is Asp, Leu, Glu, Ile, Val or deleted; the amino acid at position 228 is Thr, Ser or deleted; the amino acid at position 229 is Tyr or deleted; the amino acid at position 230 is Leu, Ile, Val or deleted; the amino acid at position 231 is Gly, Ala or deleted; the amino acid at position 232 is Ile, Leu, Val or deleted; the amino acid at position 233 is Pro or deleted; the amino acid at position 234 is Ala, Pro, Gly or deleted; the amino acid at position 235 is Asp, Ile, Leu, Glu or Val; the amino acid at position 236 is Val, Ser, Ile, Leu, Thr, Asp or Glu; the amino acid at position 237 is Ala, Phe or Tyr; the amino acid at position 238 is Ala, Gly, Ser or Thr; the amino acid at position 239 is Val, Ser, Ile, Leu, Thr, Ala or Gly; the amino acid at position 240 is Leu, Val or Ile; the amino acid at position 243 is Asp or Glu; the amino acid at position 249 is Asn, Gln, Thr or Ser; the amino acid at position 252 is Leu, Ile, Val or Met; the amino acid at position 257 is Thr or Ser; the amino acid at position 259 is His, Ile, Val or Leu; the amino acid at position 266 is Ala, Ile, Leu or Val; the amino acid at position 267 is Cys, Ala or Gly; the amino acid at position 268 is His, Arg, Lys or Tyr; the amino acid at position 272 is Asp or Glu; the amino acid at position 273 is Val, Met, Ile or Leu; the amino acid at position 274 is Val, Ile, Leu or Met; the amino acid at position 278 is Gly or Ala; the amino acid at position 279 is Glu, Asp, Gly or Val; the amino acid at position 281 is Leu, Ile, Val, Gly or Ala; the amino acid at position 282 is Asn, Leu or Ile; the amino acid at position 285 is Asn, Gln, Thr or Ser; the amino acid at position 286 is Lys, Asp, Arg or Glu; the amino acid at position 287 is Leu, Ile or Val; the amino acid at position 290 is Pro, Gln, Asn, Lys or Arg; the amino acid at position 291 is Leu, Ile or Val; the amino acid at position 292 is Lys, Arg, Ile, Leu or Val; the amino acid at position 293 is Glu, Asp, Asn or Gln; the amino acid at position 294 is Ser, Asn, Thr, Gln, Arg or Lys; the amino acid at position 295 is Thr or Ser; the amino acid at position 296 is Gln, Asn or His; the amino acid at position 297 is Leu, Ile, Val or Met; the amino acid at position 300 is Ser or Thr; the amino acid at position 301 is Glu, Asp, Gly or Ala; the amino acid at position 302 is Ser, Pro, Thr, Gly or Ala; the amino acid at position 304 is Lys, Arg, Gln or Asn; the amino acid at position 313 is Val, Leu or Ile; the amino acid at position 314 is His, Glu, Asn, Asp or Gln; the amino acid at position 315 is Ala, Cys, Gly, Thr or Ser; the amino acid at position 316 is Ala, Ile, Leu or Val; the amino acid at position 317 is Met, Leu, Val or Ile; the amino acid at position 319 is Met, Leu, Val or Ile; the amino acid at position 320 is Val, Ile, Leu, Ala or Gly; the amino acid at position 321 is Arg, Lys or Pro; the amino acid at position 322 is Ile, Leu, Val or Phe; the amino acid at position 323 is Gly, Ile, Leu or Val; the amino acid at position 324 is Leu, Ile, Val, Thr or Ser; the amino acid at position 336 is Ser, Thr, Gln or Asn; the amino acid at position 339 is Asn, Lys, Gln or Arg; the amino acid at position 350 is Arg, Lys, Asn or Gln; the amino acid at position 351 is Glu or Asp; the amino acid at position 353 is Lys or Arg; the amino acid at position 354 is Gln, Asn, Lys or Arg; the amino acid at position 355 is Phe, Ile, Leu or Leu; the amino acid at position 356 is Lys or Arg; the amino acid at position 360 is Ile, Val, Leu, Gly or Ala; the amino acid at position 365 is Leu, Ile, Val or Phe; the amino acid at position 371 is or Glu or Asp; the amino acid at position 372 is or Lys or Arg; the amino acid at position 374 is Arg or Lys; the amino acid at position 376 is Phe, Ile, Val or Leu; the amino acid at position 378 is Glu or Asp; the amino acid at position 381 is Leu, Ile or Val; the amino acid at position 388 is Ala, Thr, Gly or Ser; the amino acid at position 395 is Arg or Lys; the amino acid at position 396 is Glu, Gln, Asp, Asn, Ala or Gly; the amino acid at position 399 is Asp, Gln, Glu or Asn; the amino acid at position 400 is Asn, Thr, Ser, Glu, Gln or Asp; the amino acid at position 401 is Thr, Ser, Gly or Ala; the amino acid at position 402 is Phe, Ile, Val or Leu; the amino acid at position 406 is Asp or Glu; the amino acid at position 408 is Leu, Ile, Val or Met; the amino acid at position 410 is Gly, Ile, Val, Ala or Leu; the amino acid at position 414 is Ala, Gly, Asp or Glu; the amino acid at position 416 is Ser, Asn, Thr, Gin, Glu or Asp; the amino acid at position 417 is Ser, Arg, Lys, Thr, Ala or Gly; the amino acid at position 423 is Lys, Arg, Asn or Gln; the amino acid at position 431 is Arg or Lys; the amino acid at position 432 is Gln, Asn, Asp or Glu; the amino acid at position 436 is Arg, Lys, Asp or Glu; the amino acid at position 440 is Asn, Gln, Lys or Arg; the amino acid at position 442 is Leu, Ile or Val; the amino acid at position 447 is Ser, Lys, Thr or Arg; the amino acid at position 448 is Ala, Gly, Thr or Ser; the amino acid at position 451 is Gln, Asn or Met; the amino acid at position 453 is Gly or Ala; the amino acid at position 455 is Ala, Leu, Ile or Val; the amino acid at position 457 is Leu, Ile or Val; the amino acid at position 467 is Val, Ile, Leu, Gly or Ala; the amino acid at position 471 is Gly or Ala; the amino acid at position 475 is Ser, Thr, Gln or Asn; the amino acid at position 483 is Gly or Ala; the amino acid at position 493 is Gln, Asn or Gly; the amino acid at position 504 is Val, Leu or Ile; the amino acid at position 506 is Asp, Glu or His; the amino acid at position 509 is Asp, Glu, Gln or Asn; the amino acid at position 510 is Ser, Thr, Gly or Ala; the amino acid at position 512 is Glu or Asp; the amino acid at position 515 is Gly, Ala, Thr or Ser; the amino acid at position 516 is Gln, Asn or His; the amino acid at position 517 is Ile, Val or Leu; the amino acid at position 519 is Asp, Asn, Glu, Gly or Gln; the amino acid at position 522 is Val, Glu, Pro, Ile, Leu or Asp; the amino acid at position 525 is Glu or Asp; the amino acid at position 526 is Leu, Ile, Val or Met; the amino acid at position 539 is Val, Leu or Ile; the amino acid at position 555 is Val, Leu, Ile or Ala; the amino acid at position 557 is Arg or Lys; the amino acid at position 563 is Val, Leu, Ile or Met; the amino acid at position 571 is Ser, Thr or Cys; the amino acid at position 575 is Val, Leu, Ile, Asp or Glu; the amino acid at position 577 is Met, Leu, Val or Ile; the amino acid at position 579 is Glu, Asp, Asn or Gln; the amino acid at position 583 is Asp or Glu; the amino acid at position 589 is Met, Ile, Val or Leu; the amino acid at position 590 is Met, Ile, Val or Leu; the amino acid at position 593 is Met, Leu, Val or Ile; the amino acid at position 595 is Arg, Lys, Asn or Gln; the amino acid at position 596 is Ser or Thr; the amino acid at position 597 is Gln, Asn or His; the amino acid at position 607 is Ala, Gly, Ile, Leu or Val; the amino acid at position 608 is Asp, Glu, Gln or Asn; the amino acid at position 612 is Tyr, His or Phe; the amino acid at position 617 is Thr, Ser, Leu, Val or Ile; the amino acid at position 618 is Gln, Asn or His; the amino acid at position 625 is Arg, Lys, Thr or Ser; the amino acid at position 626 is Met, Leu, Val or Ile; the amino acid at position 628 is Leu, Val or Ile; the amino acid at position 633 is Ile, Leu, Val or Met; the amino acid at position 634 is Leu, Ile, Val or Met; the amino acid at position 642 is Arg, Lys or Met; the amino acid at position 648 is Met, Ser or Thr; the amino acid at position 651 is Glu, Asp, Asn or Gln; the amino acid at position 654 is Thr, Val, Ser, Ile, Leu, Gly or Ala; the amino acid at position 658 is Gly, Lys, Ala or Arg; the amino acid at position 663 is Gly or Ala; the amino acid at position 664 is Asp, Glu, Gln or Asn; the amino acid at position 668 is Ala, Gly, Ser or Thr; the amino acid at position 669 is Gln, Asn or His; the amino acid at position 671 is Asn, Gln, Thr or Ser the amino acid at position 675 is Ile, Val, Ile, Thr or Ser; the amino acid at position 678 is Met, Ile, Ala, Leu, Ser or Thr; the amino acid at position 682 is Pro, Asn or Gln; the amino acid at position 683 is Ser, Thr or Pro; the amino acid at position 685 is Asp, Glu, Asp or Asn; the amino acid at position 694 is Asp, Glu, Ala or Gly; the amino acid at position 697 is Asn, Gln, Thr or Ser; the amino acid at position 704 is Glu, Asp, Ala or Gly; the amino acid at position 714 is Ala or Gly; the amino acid at position 721 is Ser, Thr or Phe; the amino acid at position 722 is Ser, Thr, Gln or Asn; the amino acid at position 724 is Ser or Thr; the amino acid at position 734 is His, Asn or Gln; the amino acid at position 736 is Val, Leu, Ile or Ala; the amino acid at position 737 is Lys, Arg, Asn or Gln; the amino acid at position 739 is Ala, Gly, Thr or Ser; the amino acid at position 740 is Ser, Thr or Met; the amino acid at position 741 is Gly, Ala, Gin or Asn; the amino acid at position 742 is Ile, Leu, Val, Ala or Gly; the amino acid at position 743 is Gly or deleted; the amino acid at position 745 is Gly, Ala, Glu or Asp; the amino acid at position 751 is Thr, Ser, Gly or Ala; the amino acid at position 753 is Gln, Asn, Lys or Arg; the amino acid at position 754 is Thr or Ser; the amino acid at position 756 is Thr, Ser, Leu, Val or Ile; the amino acid at position 757 is Val, Leu or Ile; the amino acid at position 766 is Ile, Leu or Val; the amino acid at position 773 is Asp or Glu; the amino acid at position 774 is Gln, Asn, Asp or Glu; the amino acid at position 776 is Leu, Ile, Val or Met; the amino acid at position 777 is Pro, Ser or Thr; the amino acid at position 782 is Ala, Asp, Glu, Ile, Leu or Val; the amino acid at position 786 is Tyr or Phe; the amino acid at position 787 is His, Asn or Gln; the amino acid at position 788 is Tyr or Met; the amino acid at position 789 is Ala, Lys or Arg; the amino acid at position 790 is Tyr or Thr; the amino acid at position 791 is Arg, Lys, Gly or Ala; the amino acid at position 792 is Leu, Ile, Val, Thr or Ser; the amino acid at position 796 is Asp or Glu; the amino acid at position 797 is Ser, Thr or Ala the amino acid at position 802 is Glu, Lys, Asp, Asn or Gln; the amino acid at position 806 is Gln, Asp, Glu, Asn or His; the amino acid at position 810 is Lys, Arg or Thr; the amino acid at position 819 is Arg, Lys or His; the amino acid at position 829 is Lys, Ser, Ala or Pro; the amino acid at position 832 is Ala, Lys, Arg, Asp or Glu; the amino acid at position 833 is Gly, Ala, Asp or Glu; the amino acid at position 842 is Leu, Ile, Val or Pro; the amino acid at position 847 is Gln, Asn, Asp or Glu; the amino acid at position 848 is Ile, Leu or Val; the amino acid at position 849 is Val, Leu, Ile, Gly or Ala; the amino acid at position 855 is Thr, Ser or Met; the amino acid at position 860 is Ile, Leu or Val; the amino acid at position 864 is His, Asn or Gln;

[0042] In some embodiments the nucleic acid molecule encodes a PtIP-83 polypeptide variant of SEQ ID NO: 1, wherein the amino acid at position 1 is Met or deleted; the amino acid at position 2 is Ala or deleted; the amino acid at position 3 is Leu, Val, Ile or deleted; the amino acid at position 4 is Val, Met, Ile or Leu; the amino acid at position 7 is Gly, Thr or Ser; the amino acid at position 8 is Lys, Arg, Ser or Thr; the amino acid at position 10 is Phe, Trp or Tyr; the amino acid at position 11 is Glu, Asp, Lys or Arg; the amino acid at position 18 is Met, Val, Leu or Ile; the amino acid at position 19 is Gly, Pro or Ala; the amino acid at position 20 is Val, Ile, Leu or deleted; the amino acid at position 21 is Leu, Ile or Val; the amino acid at position 23 is Arg, Lys, Asn or Gln; the amino acid at position 37 is Val, Ile or Leu; the amino acid at position 38 is Arg, Lys, Gln or Asn; the amino acid at position 40 is Ala, Gly, Thr or Ser; the amino acid at position 43 is Asn, Gln, Glu or Asp; the amino acid at position 45 is Gly or Ala; the amino acid at position 46 is Gln, Asp, Asn or Glu; the amino acid at position 48 is Glu, Asp, Pro, Ile, Leu or Val; the amino acid at position 51 is Glu, Asp, Ala or Gly; the amino acid at position 52 is Lys, Arg, Ser or Thr; the amino acid at position 53 is Val, Ala, Cys or Thr; the amino acid at position 54 is Lys, Ala, Cys, Asp, Glu, Gly, His, Ile, Leu, Met, Asn, Gin, Arg, Ser or Thr; the amino acid at position 55 is Arg, Ala, Asp, Glu, Phe, Gly, His, Lys, Leu, Met, Asn, Gln, Ser, Thr, Val, Trp or Tyr; the amino acid at position 56 is Leu, Glu, Phe, Ile, Met, Thr or Val; the amino acid at position 57 is Tyr, Cys, Ile, Leu, Met, Thr or Val; the amino acid at position 58 is Val, Cys, Ile or Leu; the amino acid at position 59 is Phe, Leu, Met, Val or Tyr; the amino acid at position 60 is Ala, Cys, Gly, Ser, Thr or Val; the amino acid at position 61 is Asp, Glu, His or Ser; the amino acid at position 62 is Val, Ala, Cys, Ile, Leu or Thr; the amino acid at position 63 is Val, Ala, Cys, Ile, Leu, Met or Thr; the amino acid at position 64 is Glu, Ala, Cys, Phe, Gly, His, Ile, Leu, Met, Asn, Gln, Arg, Ser, Thr, Val, Trp or Tyr; the amino acid at position 65 is Leu, Ala, Cys, Phe, His, Ile, Met, Asn, Gln, Thr, Val or Trp; the amino acid at position 66 is Pro, Asp, Gly, Met, Gln or Arg; the amino acid at position 67 is Val, Pro, Ile, Leu, Ser or Thr; the amino acid at position 68 is Val, Arg, Phe, Ile, Leu, Lys or Gly; the amino acid at position 69 is Glu, Ala, Asp, Gly, Arg or Lys; the amino acid at position 70 is Trp, Thr, His, Tyr, Lys or Arg; the amino acid at position 71 is Arg, Pro, Lys or deleted; the amino acid at position 72 is Trp, Asp, Leu, Ile, Val, Glu or deleted; the amino acid at position 73 is Pro, Gln, Asn, His or deleted; the amino acid at position 74 is Pro, Met, Ser or Thr; the amino acid at position 75 is Gln, His, Asn, Lys or Arg; the amino acid at position 76 is Ile, Met, Val or Leu; the amino acid at position 84 is Ile, Leu or Val; the amino acid at position 91 is Trp or Phe; the amino acid at position 93 is Thr, Ser, Leu, Val or Ile; the amino acid at position 94 is Asp, Glu, Ala or Gly; the amino acid at position 96 is Arg, Lys, Thr or Ser; the amino acid at position 97 is Gln, Phe, Asn, Lys or Arg; the amino acid at position 98 is Ser, Thr or deleted; the amino acid at position 99 is Asp, Glu, Gly or Ala; the amino acid at position 100 is Thr, Ser, Gly or Ala; the amino acid at position 101 is Glu, Thr, Asp, Ser or Trp the amino acid at position 103 is His, Arg, Lys, Glu or Gln; the amino acid at position 105 is Thr, Ser or Pro; the amino acid at position 108 is Lys, Arg, Asn, Asp, Gln or Glu; the amino acid at position 109 is Leu, Ile or Val; the amino acid at position 111 is Ala, Ser or Thr; the amino acid at position 112 is Ile, Arg, Thr, Leu, Val, Lys, Ser or deleted; the amino acid at position 113 is Gln, Ala, Gly, Asn or deleted; the amino acid at position 114 is Arg, Glu, Lys, Asp or Ile; the amino acid at position 115 is Glu, Asp, Asn or Gln; the amino acid at position 116 is Glu, Asn, Gln, Asp, Lys or Arg; the amino acid at position 117 is Asn, Val, Tyr, Ile, Leu, Gln, Trp or Phe; the amino acid at position 118 is Arg or Lys; the amino acid at position 119 is Trp, Thr or Ser; the amino acid at position 122 is Thr, Lys, Ser, Arg or Ala; the amino acid at position 124 is Ala, Gly, Ser or Thr; the amino acid at position 126 is Gly, Ala, Glu or Asp; the amino acid at position 127 is Met, Gly or Ala; the amino acid at position 128 is Asn, Gln, Arg or Lys; the amino acid at position 131 is Val, Ile, Leu, Ser or Thr; the amino acid at position 133 is Ile, Leu or Val; the amino acid at position 134 is His or Tyr; the amino acid at position 135 is Ala or Gly; the amino acid at position 137 is Glu, Asp, Arg or Lys; the amino acid at position 139 is Gln, Asn, Asp or Glu; the amino acid at position 140 is Val, Arg, Ile, Lys or Leu; the amino acid at position 141 is Gly, Ala, Thr or Ser; the amino acid at position 142 is Val, Ile, Leu or Pro; the amino acid at position 144 is Thr, Leu, Phe, Ile, Val or Tyr; the amino acid at position 145 is Met, Pro, Gin or Asn; the amino acid at position 146 is Ser, Gly, Thr, Ala, Gln or Asn; the amino acid at position 147 is Trp, Gln, Tyr or Asn; the amino acid at position 148 is Ser, Ala, Thr, Gly or Pro; the amino acid at position 149 is Ser, Thr or deleted; the amino acid at position 150 is Val, Ile, Leu or Tyr; the amino acid at position 152 is Arg, Ala, Val, Ile, Leu, Lys or Gly; the amino acid at position 154 is Ser, Trp, Thr, Asp or Glu; the amino acid at position 156 is Leu, Asp, Ile, Val, Asn, Glu or Gln; the amino acid at position 158 is Ser, Thr or Cys; the amino acid at position 159 is Val, Thr, Leu or Ile; the amino acid at position 162 is Ser, Thr, Gly or Ala; the amino acid at position 163 is Gly, Ala or deleted; the amino acid at position 164 is Phe or deleted; the amino acid at position 165 is Arg, Lys, Gly or Ala; the amino acid at position 166 is Ala, Arg, Met, Lys or Phe; the amino acid at position 167 is Val, Ile, Leu or His; the amino acid at position 168 is Ser, Thr, Gln or Asn; the amino acid at position 169 is Val, His, Ile, Leu, Ser or Thr; the amino acid at position 170 is Phe, Ile, Leu or Val; the amino acid at position 171 is Glu, Asn, Gln or Asp; the amino acid at position 172 is Val, Ala, Arg, Ile, Leu, Gly, Lys, Asp or Glu; the amino acid at position 175 is Ser, Arg, Thr, Lys or Trp; the amino acid at position 176 is Val, Leu or Ile; the amino acid at position 177 is Arg, Lys, Leu, Val or Ile; the amino acid at position 179 is Thr, Ile, Val, Leu or Ser; the amino acid at position 180 is Leu, Phe, Ile, Val, Ser or Thr; the amino acid at position 181 is Gly, Thr, Gln, Asn or Ser; the amino acid at position 182 is Ala, Leu, Phe, Val or Ile; the amino acid at position 183 is Thr, Ser, Ala or Gly; the amino acid at position 184 is Leu, Thr, Ser, Ile, Val, Lys or Arg; the amino acid at position 185 is Arg, Gly, Asp, Lys, Glu or Ala; the amino acid at position 186 is Pro, Val, Ile, Leu, Asn or Gln; the amino acid at position 187 is Asp, Thr, Glu or Ser; the amino acid at position 188 is His, Gly or Ala; the amino acid at position 189 is Ala, Arg, Pro, Lys, Gly or deleted; the amino acid at position 190 is Leu, Asn, Ile, Val, Gln or deleted; the amino acid at position 191 is Tyr or deleted; the amino acid at position 192 is Ser, Ile, Val, Leu, Thr or Asn; the amino acid at position 193 is Thr, Ser, Glu or Asp; the amino acid at position 194 is Thr or Ser; the amino acid at position 195 is Met or Thr; the amino acid at position 196 is Gln, His, Leu, Asn, Ile, Val, Thr or Ser; the amino acid at position 197 is Ala, Gly, Ile, Val or Leu; the amino acid at position 198 is Thr, Glu, Ser, Asp, Gly or Ala; the amino acid at position 199 is Pro, Lys or Arg; the amino acid at position 200 is Asn, Ser, Thr, Gln, Ala or Gly; the amino acid at position 201 is Ala, Leu, Glu, Ile, Asp or Trp; the amino acid at position 202 is Ser, Asp, Phe, Ile, Val, Thr, Glu or Leu; the amino acid at position 203 is His, Pro, Gly, Ala, Thr or Ser; the amino acid at position 204 is Ile, Trp, His, Leu, Val, Ala or Gly; the amino acid at position 205 is Ser, Asn, Leu, Val, Thr, Gln or Ile; the amino acid at position 206 is Ala, Gly, Asp, Tyr, Glu, Lys or Arg; the amino acid at position 207 is Phe, Val, Ile or Leu; the amino acid at position 208 is Asn, Ser, Pro, Gln, Thr, Val, Ile or Leu; the amino acid at position 210 is Arg, Asp, Glu, Lys, Ser or Tyr; the amino acid at position 211 is Ile, Ser, Leu, Val or Thr; the amino acid at position 212 is Val, Ala, Ile, Leu, Glu, Gly or Asp; the amino acid at position 214 is Pro, Lys or Arg; the amino acid at position 215 is Ser or Thr; the amino acid at position 217 is Tyr or Phe; the amino acid at position 218 is Arg, Lys, Thr or Ser; the amino acid at position 219 is Val, Ile, Leu or Ala; the amino acid at position 220 is Cys, Leu, Ile, Val, Thr or Ser; the amino acid at position 221 is Pro or His; the amino acid at position 222 is Leu, Arg, Lys, Ile, Val, Thr or Ser; the amino acid at position 224 is Asn, Gln, Thr or Ser; the amino acid at position 225 is Asp, Arg, Glu, Lys, Ser or Thr; the amino acid at position 226 is Thr, Ser, Gln or Asn; the amino acid at position 227 is Asp, Leu, Glu, Ile, Val or deleted; the amino acid at position 228 is Thr, Ser or deleted; the amino acid at position 229 is Tyr or deleted; the amino acid at position 230 is Leu, Ile, Val or deleted; the amino acid at position 231 is Gly, Ala or deleted; the amino acid at position 232 is Ile, Leu, Val or deleted; the amino acid at position 233 is Pro or deleted; the amino acid at position 234 is Ala, Pro, Gly or deleted; the amino acid at position 235 is Asp, Ile, Leu, Glu or Val; the amino acid at position 236 is Val, Ser, Ile, Leu, Thr, Asp or Glu; the amino acid at position 237 is Ala, Phe or Tyr; the amino acid at position 238 is Ala, Gly, Ser or Thr; the amino acid at position 239 is Val, Ser, Ile, Leu, Thr, Ala or Gly; the amino acid at position 240 is Leu, Val or Ile; the amino acid at position 243 is Asp or Glu; the amino acid at position 249 is Asn, Gln, Thr or Ser; the amino acid at position 252 is Leu, Ile, Val or Met; the amino acid at position 257 is Thr or Ser; the amino acid at position 259 is His, Ile, Val or Leu; the amino acid at position 266 is Ala, Ile, Leu or Val; the amino acid at position 267 is Cys, Ala or Gly; the amino acid at position 268 is His, Arg, Lys or Tyr; the amino acid at position 272 is Asp or Glu; the amino acid at position 273 is Val, Met, Ile or Leu; the amino acid at position 274 is Val, Ile, Leu or Met; the amino acid at position 278 is Gly or Ala; the amino acid at position 279 is Glu, Asp, Gly or Val; the amino acid at position 281 is Leu, Ile, Val, Gly or Ala; the amino acid at position 282 is Asn, Leu or Ile; the amino acid at position 285 is Asn, Gln, Thr or Ser; the amino acid at position 286 is Lys, Asp, Arg or Glu; the amino acid at position 287 is Leu, Ile or Val; the amino acid at position 290 is Pro, Gln, Asn, Lys or Arg; the amino acid at position 291 is Leu, Ile or Val; the amino acid at position 292 is Lys, Arg, Ile, Leu or Val; the amino acid at position 293 is Glu, Asp, Asn or Gln; the amino acid at position 294 is Ser, Asn, Thr, Gln, Arg or Lys; the amino acid at position 295 is Thr or Ser; the amino acid at position 296 is Gln, Asn or His; the amino acid at position 297 is Leu, Ile, Val or Met; the amino acid at position 300 is Ser or Thr; the amino acid at position 301 is Glu, Asp, Gly or Ala; the amino acid at position 302 is Ser, Pro, Thr, Gly or Ala; the amino acid at position 304 is Lys, Arg, Gln or Asn; the amino acid at position 313 is Val, Leu or Ile; the amino acid at position 314 is His, Glu, Asn, Asp or Gln; the amino acid at position 315 is Ala, Cys, Gly, Thr or Ser; the amino acid at position 316 is Ala, Ile, Leu or Val; the amino acid at position 317 is Met, Leu, Val or Ile; the amino acid at position 319 is Met, Leu, Val or Ile; the amino acid at position 320 is Val, Ile, Leu, Ala or Gly; the amino acid at position 321 is Arg, Lys or Pro; the amino acid at position 322 is Ile, Leu, Val or Phe; the amino acid at position 323 is Gly, Ile, Leu or Val; the amino acid at position 324 is Leu, Ile, Val, Thr or Ser; the amino acid at position 336 is Ser, Thr, Gln or Asn; the amino acid at position 339 is Asn, Lys, Gln or Arg; the amino acid at position 350 is Arg, Lys, Asn or Gln; the amino acid at position 351 is Glu or Asp; the amino acid at position 353 is Lys or Arg; the amino acid at position 354 is Gln, Asn, Lys or Arg; the amino acid at position 355 is Phe, Ile, Leu or Leu; the amino acid at position 356 is Lys or Arg; the amino acid at position 360 is Ile, Val, Leu, Gly or Ala; the amino acid at position 363 is Gln, Ala, Cys, Glu, Phe, Gly, His, Lys, Leu, Asn, Arg, Ser, Thr, Val or Trp; the amino acid at position 364 is Ile, Ala, Cys, Glu, Phe, His, Lys, Leu, Met, Asn, Gln, Ser, Thr, Val, Trp or Tyr; the amino acid at position 365 is Leu, Ala, Glu, Phe, Gly, His, Ile, Lys, Met, Asn, Arg, Val, Trp or Tyr; the amino acid at position 366 is Gly, Ala, Cys, Phe, His, Ile, Lys, Leu, Met, Asn, Ser, Thr or Val; the amino acid at position 367 is Ser, Ala, Cys, Asp, Glu, Phe, Gly, His, Ile, Leu, Met, Asn, Pro, Gln, Arg, Thr, Val or Trp; the amino acid at position 368 is Tyr, Ala, Cys, Asp, Glu, Phe, Gly, His, Ile, Lys, Leu, Met, Asn, Pro, Gln, Arg, Ser, Thr, Val or Trp; the amino acid at position 369 is Leu, Ala, Cys, Asp, Phe, Gly, Ile, Met, Thr or Val; the amino acid at position 370 is Leu, Ala, Cys, Asp, Glu, Phe, Gly, His, Ile, Lys, Met, Gln, Arg, Ser, Thr, Val, Trp or Tyr; the amino acid at position 371 is Gln, Ala, Cys, Asp, Glu, Phe, Gly, Ile, Lys, Leu, Asn, Arg, Ser, Thr, Val or Trp; the amino acid at position 372 is Gln, Ala, Cys, Asp, Phe, Gly, His, Ile, Leu, Asn, Arg, Ser, Val or Tyr; the amino acid at position 373 is Asn, Ala, Cys, Asp, Phe, Gly, His, Ile, Lys, Gln, Ser, Thr, Val or Trp; the amino acid at position 374 is Arg or Lys; the amino acid at position 376 is Phe, Ile, Val or Leu; the amino acid at position 378 is Glu or Asp; the amino acid at position 381 is Leu, Ile or Val; the amino acid at position 388 is Ala, Thr, Gly or Ser; the amino acid at position 395 is Arg or Lys; the amino acid at position 396 is Glu, Gln, Asp, Asn, Ala or Gly; the amino acid at position 399 is Asp, Gln, Glu or Asn; the amino acid at position 400 is Asn, Thr, Ser, Glu, Gln or Asp; the amino acid at position 401 is Thr, Ser, Gly or Ala; the amino acid at position 402 is Phe, Ile, Val or Leu; the amino acid at position 406 is Asp or Glu; the amino acid at position 408 is Leu, Ile, Val or Met; the amino acid at position 410 is Gly, Ile, Val, Ala or Leu; the amino acid at position 414 is Ala, Gly, Asp or Glu; the amino acid at position 416 is Ser, Asn, Thr, Gln, Glu or Asp; the amino acid at position 417 is Ser, Arg, Lys, Thr, Ala or Gly; the amino acid at position 423 is Lys, Arg, Asn or Gln; the amino acid at position 431 is Arg or Lys; the amino acid at position 432 is Gln, Asn, Asp or Glu; the amino acid at position 436 is Arg, Lys, Asp or Glu; the amino acid at position 440 is Asn, Gln, Lys or Arg; the amino acid at position 442 is Leu, Ile or Val; the amino acid at position 447 is Ser, Lys, Thr or Arg; the amino acid at position 448 is Ala, Gly, Thr or Ser; the amino acid at position 451 is Gin, Asn or Met; the amino acid at position 453 is Gly or Ala; the amino acid at position 455 is Ala, Leu, Ile or Val; the amino acid at position 457 is Leu, Ile or Val; the amino acid at position 467 is Val, Ile, Leu, Gly or Ala; the amino acid at position 471 is Gly or Ala; the amino acid at position 475 is Ser, Thr, Gln or Asn; the amino acid at position 483 is Gly or Ala; the amino acid at position 493 is Gln, Asn or Gly; the amino acid at position 504 is Val, Leu or Ile; the amino acid at position 506 is Asp, Glu or His; the amino acid at position 509 is Asp, Glu, Gln or Asn; the amino acid at position 510 is Ser, Thr, Gly or Ala; the amino acid at position 512 is Glu or Asp; the amino acid at position 515 is Gly, Ala, Thr or Ser; the amino acid at position 516 is Gln, Asn or His; the amino acid at position 517 is Ile, Val or Leu; the amino acid at position 519 is Asp, Asn, Glu, Gly or Gln; the amino acid at position 522 is Val, Glu, Pro, Ile, Leu or Asp; the amino acid at position 525 is Glu or Asp; the amino acid at position 526 is Leu, Ile, Val or Met; the amino acid at position 539 is Val, Leu or Ile; the amino acid at position 555 is Val, Leu, Ile or Ala; the amino acid at position 556 is Trp, Phe, Thr or Tyr; the amino acid at position 557 is Arg, Cys, Asp, Gly, His, Ile, Lys, Leu, Met, Asn, Pro, Gln, Ser, Thr, Val, Trp or Tyr; the amino acid at position 558 is Ala, Cys, Asp, Phe, Gly, His, Ile, Lys, Leu, Asn, Pro, Gln, Arg, Ser, Val, Trp or Tyr; the amino acid at position 559 is Lys, Ala, Cys, Phe, Gly, His, Ile, Leu, Asn, Gln, Arg, Ser, Thr, Val or Tyr; the amino acid at position 560 is Cys, Ala, Phe, Gly, Ile, Met, Asn, Arg, Ser, Thr or Val; the amino acid at position 561 is Lys, Ala, Cys, Asp, Glu, Phe, Gly, His, Ile, Leu, Met, Asn, Arg, Ser, Thr, Val or Tyr; the amino acid at position 562 is Asn, Cys, Asp, Glu, Gly, His, Leu, Met, Arg, Ser, Thr, Val or Tyr; the amino acid at position 563 is Val, Ala, Cys, Asp, Phe, His, Ile, Leu, Met, Asn, Gln, Thr or Trp; the amino acid at position 564 is Ala, Cys, Gly, Met, Gln, Ser, Thr, Val, Trp or Tyr; the amino acid at position 571 is Ser, Thr or Cys; the amino acid at position 575 is Val, Leu, Ile, Asp or Glu; the amino acid at position 577 is Met, Leu, Val or Ile; the amino acid at position 579 is Glu, Asp, Asn or Gln; the amino acid at position 583 is Asp or Glu; the amino acid at position 589 is Met, Ile, Val or Leu; the amino acid at position 590 is Met, Ile, Val or Leu; the amino acid at position 593 is Met, Leu, Val or Ile; the amino acid at position 595 is Arg, Lys, Asn or Gln; the amino acid at position 596 is Ser or Thr; the amino acid at position 597 is Gln, Asn or His; the amino acid at position 607 is Ala, Gly, Ile, Leu or Val; the amino acid at position 608 is Asp, Glu, Gln or Asn; the amino acid at position 612 is Tyr, His or Phe; the amino acid at position 617 is Thr, Ser, Leu, Val or Ile; the amino acid at position 618 is Gln, Asn or His; the amino acid at position 625 is Arg, Lys, Thr or Ser; the amino acid at position 626 is Met, Leu, Val or Ile; the amino acid at position 628 is Leu, Val or Ile; the amino acid at position 633 is Ile, Leu, Val or Met; the amino acid at position 634 is Leu, Ile, Val or Met; the amino acid at position 642 is Arg, Lys or Met; the amino acid at position 646 is Leu, Ala, Cys, Gly, Ile, Met, Asn, Gln, Ser, Thr or Val; the amino acid at position 647 is Leu, Asp, Gly, Met, Asn, Gln or Thr; the amino acid at position 648 is Met, Ala, Cys, Asp, Glu, Phe, Gly, His, Lys, Leu, Asn, Pro, Gln, Arg, Ser, Thr, Val, Trp or Tyr; the amino acid at position 649 is Pro, Ala, Cys, Asp, Glu, Phe, Gly, His, Lys, Met, Asn, Gln, Arg, Ser, Thr, Trp or Tyr; the amino acid at position 650 is Thr, Ala, Cys, Asp, Phe, Gly, His, Ile, Lys, Leu, Met, Pro, Gln, Arg, Ser, Val or Tyr; the amino acid at position 651 is Glu, Ala, Cys, Asp, Gly, His, Ile, Leu, Met, Asn, Pro, Gln, Arg, Ser, Thr, Val or Tyr; the amino acid at position 652 is Leu, Cys, Phe, Ile, Lys, Met, Pro, Arg, Ser, Thr or Val; the amino acid at position 653 is Thr, Cys, Asp, Glu, Phe, Gly, His, Ile, Lys, Leu, Pro, Arg, Ser, Val or Trp; the amino acid at position 654 is Thr, Ala, Cys, Phe, Ile, Lys, Leu, Met, Pro, Arg, Ser, Val, Trp or Tyr; the amino acid at position 655 is Trp, Phe or Tyr; the amino acid at position 658 is Gly, Lys, Ala or Arg; the amino acid at position 663 is Gly or Ala; the amino acid at position 664 is Asp, Glu, Gln or Asn; the amino acid at position 668 is Ala, Gly, Ser or Thr; the amino acid at position 669 is Gln, Asn or His; the amino acid at position 671 is Asn, Gln, Thr or Ser the amino acid at position 675 is Ile, Val, Ile, Thr or Ser; the amino acid at position 678 is Met, Ile, Ala, Leu, Ser or Thr; the amino acid at position 682 is Pro, Asn or Gln; the amino acid at position 683 is Ser, Thr or Pro; the amino acid at position 685 is Asp, Glu, Asp or Asn; the amino acid at position 694 is Asp, Glu, Ala or Gly; the amino acid at position 697 is Asn, Gln, Thr or Ser; the amino acid at position 704 is Glu, Asp, Ala or Gly; the amino acid at position 714 is Ala or Gly; the amino acid at position 721 is Ser, Thr or Phe; the amino acid at position 722 is Ser, Thr, Gln or Asn; the amino acid at position 724 is Ser or Thr; the amino acid at position 734 is His, Asn or Gln; the amino acid at position 736 is Val, Leu, Ile or Ala; the amino acid at position 737 is Lys, Arg, Asn or Gln; the amino acid at position 739 is Ala, Gly, Thr or Ser; the amino acid at position 740 is Ser, Thr or Met; the amino acid at position 741 is Gly, Ala, Gln or Asn; the amino acid at position 742 is Ile, Leu, Val, Ala or Gly; the amino acid at position 743 is Gly or deleted; the amino acid at position 745 is Gly, Ala, Glu or Asp; the amino acid at position 751 is Thr, Ser, Gly or Ala; the amino acid at position 753 is Gln, Asn, Lys or Arg; the amino acid at position 754 is Thr or Ser; the amino acid at position 756 is Thr, Ser, Leu, Val or Ile; the amino acid at position 757 is Val, Leu or Ile; the amino acid at position 766 is Ile, Leu or Val; the amino acid at position 771 is Arg, Ala, Asp, Glu, Phe, Gly, His, Ile, Lys, Leu, Asn, Ser, Thr, Val, Trp or Tyr; the amino acid at position 772 is Arg, Ala, Cys, Asp, Glu, Phe, Gly, His, Ile, Lys, Leu, Met, Pro, Gln, Ser, Thr, Val, Trp or Tyr; the amino acid at position 773 is Asp, Ala, Glu, Phe, Gly, His, Ile, Lys, Leu, Met, Asn, Gln, Arg, Ser, Thr, Val, Trp or Tyr; the amino acid at position 774 is Gln, Ala, Asp, Gly, His, Ile, Lys, Leu, Met, Asn, Pro, Arg, Ser, Thr, Val, Trp or Tyr; the amino acid at position 775 is Val, Ala, Cys, Asp, Glu, Gly, His, Ile, Asn, Pro, Gln, Arg, Ser, Thr or Tyr; the amino acid at position 776 is Leu, Ala, Cys, Asp, Glu, Phe, Gly, His, Ile, Lys, Asn, Pro, Gln, Arg, Ser, Thr, Val or Tyr; the amino acid at position 777 is Pro, Ala, Cys, Asp, Glu, Phe, Gly, His, Lys, Leu, Met, Asn, Gln, Ser, Thr, Val, Trp or Tyr; the amino acid at position 778 is Phe, Ala, His, Ile, Leu, Met, Asn, Gln, Ser, Val, Trp or Tyr; the amino acid at position 779 is Gln, Ala, Cys, Asp, Glu, Gly, His, Lys, Leu, Asn, Pro, Arg, Ser, Thr or Val; the amino acid at position 780 is Ala, Cys, Asn, Pro, Gln or Ser; the amino acid at position 781 is Ala, Cys, Asp, Glu, Phe, Gly, His, Ile, Asn, Gln, Arg, Ser, Thr, Val, Trp or Tyr; the amino acid at position 782 is Ala, Cys, Asp, Glu, Phe, Gly, His, Ile, Lys, Met, Pro, Gln, Arg, Ser, Thr, Val, Trp or Tyr; the amino acid at position 783 is Pro, Ala, Cys, Asp, Glu, Gly, His, Asn, Gln, Arg, Ser, Thr or Val; the amino acid at position 784 is Leu, Ala, Glu, Phe, His, Ile, Lys, Met, Asn, Pro, Gln, Ser, Thr, Val or Trp; the amino acid at position 785 is Asn, Ala, Cys, Glu, Phe, Gly, His, Ile, Lys, Leu, Met, Gln, Arg, Ser, Thr, Val, Trp or Tyr; the amino acid at position 786 is Tyr, Phe, Ile, Leu or Trp; the amino acid at position 787 is His, Asn or Gln; the amino acid at position 788 is Tyr or Met; the amino acid at position 789 is Ala, Lys or Arg; the amino acid at position 790 is Tyr or Thr; the amino acid at position 791 is Arg, Lys, Gly or Ala; the amino acid at position 792 is Leu, Ile, Val, Thr or Ser; the amino acid at position 796 is Asp or Glu; the amino acid at position 797 is Ser, Thr or Ala the amino acid at position 802 is Glu, Lys, Asp, Asn or Gln; the amino acid at position 806 is Gln, Asp, Glu, Asn or His; the amino acid at position 810 is Lys, Arg or Thr; the amino acid at position 819 is Arg, Lys or His; the amino acid at position 829 is Lys, Ser, Ala or Pro; the amino acid at position 832 is Ala, Lys, Arg, Asp or Glu; the amino acid at position 833 is Gly, Ala, Asp or Glu; the amino acid at position 842 is Leu, Ile, Val or Pro; the amino acid at position 847 is Gln, Asn, Asp or Glu; the amino acid at position 848 is Ile, Leu or Val; the amino acid at position 849 is Val, Leu, Ile, Gly or Ala; the amino acid at position 855 is Thr, Ser or Met; the amino acid at position 860 is Ile, Leu or Val; and the amino acid at position 864 is His, Asn or Gln.

[0043] In some embodiments the nucleic acid molecule encoding the PtIP-83 polypeptide is derived from a fern species in the Division Pteridophyta. The phylogeny of ferns as used herein is based on the classification for extant ferns by A. R. Smith et al, TAXON, 55:705-731 (2006). The consensus phylogeny based on the classification by A. R. Smith is shown in FIG. 1. Other phylogenic classifications of extant ferns are known to one skilled in the art. Additional information on the phylogeny of ferns can be found at mobot.org/MOBOT/research/APweb/ (which can be accessed using the “www” prefix) and Schuettpelz E. and Pryer K. M., TAXON 56: 1037-1050 (2007) based on three plastid genes. Additional fern and other primitive plant species can be found at homepages.caverock.net.nz/˜bj/fern/list.htm (which can be accessed using the http://prefix).

[0044] In some embodiments the nucleic acid molecule encoding the PtIP-83 polypeptide is derived from a fern species in the Class Psilotopsida. In some embodiments the nucleic acid molecule encoding the PtIP-83 polypeptide is derived from a fern species in the Class Psilotopsida, Order Psilotales. In some embodiments the the nucleic acid molecule encoding PtIP-83 polypeptide is derived from a fern species in the Class Psilotopsida, Order Ophioglossales. In some embodiments the nucleic acid molecule encoding the PtIP-83 polypeptide is derived from a fern species in the Class Psilotopsida, Order Ophioglossales, Family Psilotaceae. In some embodiments the nucleic acid molecule encoding the PtIP-83 polypeptide is derived from a fern species in the Class Psilotopsida, Order Ophioglossales Family Ophioglossaceae. In some embodiments the nucleic acid molecule encoding the PtIP-83 polypeptide is derived from a fern species in the Genus Ophioglossum L., Botrychium, Botrypus, Helminthostachys, Ophioderma, Cheiroglossa, Sceptridium or Mankyua.

[0045] In some embodiments the nucleic acid molecule encoding the PtIP-83 polypeptide is derived from a species in the Class Polypodiopsida/Pteridopsida. In some embodiments the nucleic acid molecule encoding the PtIP-83 polypeptide is derived from a fern species in the Order Osmundales (royal ferns); Family Osmundaceae. In some embodiments the nucleic acid molecule encoding the PtIP-83 polypeptide is derived from a fern species in the Order Hymenophyllales; Family Hymenophyllaceae. In some embodiments the nucleic acid molecule encoding the PtIP-83 polypeptide is derived from a fern species in the Order Gleicheniales; Family Gleicheniaceae, Family Dipteridaceae or Family Matoniaceae. In some embodiments the nucleic acid molecule encoding the PtIP-83 polypeptide is derived from a fern species in the Order Schizaeales; Family Lygodiaceae, Family Anemiaceae or Family Schizaeaceae. In some embodiments the nucleic acid encoding the PtIP-83 polypeptide is derived from a fern species in the Order Schizaeales; Family Schizaeaceae, Genus Lygodium selected from but not limited to Lygodium articulatum, Lygodium circinatum, Lygodium conforme, Lygodium cubense, Lygodium digitatum, Lygodium flexuosum, Lygodium heterodoxum, Lygodium japonicum, Lygodium kerstenii, Lygodium lanceolatum, Lygodium longifolium, Lygodium merrilii, Lygodium micans, Lygodium microphyllum, Lygodium microstachyum, Lygodium oligostachyum, Lygodium palmatum, Lygodium polystachyum, Lygodium radiatum, Lygodium reticulatum, Lygodium salicifolium, Lygodium scandens, Lygodium smithianum, Lygodium subareolatum, Lygodium trifurcatum, Lygodium venustum, Lygodium versteeghii, Lygodium volubile, and Lygodium yunnanense. In some embodiments the nucleic acid molecule encoding the PtIP-83 polypeptide is derived from a fern species in the Order Salviniales; Family Marsileaceae or Family Salviniaceae. In some embodiments the nucleic acid molecule encoding the PtIP-83 polypeptide is derived from a fern species in the Order Cyatheales; Family Thyrsopteridaceae, Family Loxsomataceae, Family Culcitaceae, Family Plagiogyriaceae, Family Cibotiaceae, Family Cyatheaceae, Family Dicksoniaceae or Family Metaxyaceae.

[0046] In some embodiments the nucleic acid molecule encoding the PtIP-83 polypeptide is derived from a fern species in the Order Polypodiales; Family Lindsaeaceae, Family Saccolomataceae, Family Cystodiaceae, Family Dennstaedtiaceae, Family Pteridaceae, Family Aspleniaceae, Family Thelypteridaceae, Family Woodsiaceae, Family Onocleaceae, Family Blechnaceae, Family Dryopteridaceae, Family Lomariopsidaceae, Family Tectariaceae, Family Oleandraceae, Family Davalliaceae or Family Polypodiaceae.

[0047] In some embodiments the nucleic acid molecule encoding the PtIP-83 polypeptide is derived from a fern species in the Order Polypodiales, Family Pteridaceae, Genus Adiantaceae selected from but not limited to Adiantum aethiopicum, Adiantum aleuticum, Adiantum bonatianum, Adiantum cajennense, Adiantum capillus-junonis, Adiantum capillus-veneris, Adiantum caudatum, Adiantum chienii, Adiantum chilense, Adiantum cuneatum, Adiantum cunninghamii, Adiantum davidii, Adiantum diaphanum, Adiantum edentulum, Adiantum edgeworthii, Adiantum excisum, Adiantum fengianum, Adiantum fimbriatum, Adiantum flabellulatum, Adiantum formosanum, Adiantum formosum, Adiantum fulvum, Adiantum gravesii, Adiantum hispidulum, Adiantum induratum, Adiantum jordanii, Adiantum juxtapositum, Adiantum latifolium, Adiantum leveillei, Adiantum lianxianense, Adiantum malesianum, Adiantum mariesii, Adiantum monochlamys, Adiantum myriosorum, Adiantum obliquum, Adiantum ogasawarense, Adiantum pedatum, Adiantum pentadactylon, Adiantum peruvianum, Adiantum philippense, Adiantum princeps, Adiantum pubescens, Adiantum raddianum, Adiantum reniforme, Adiantum roborowskii, Adiantum serratodentatum, Adiantum sinicum, Adiantum soboliferum, Adiantum subcordatum, Adiantum tenerum, Adiantum terminatum, Adiantum tetraphyllum, Adiantum trapeziforme, Adiantum venustum, Adiantum viridescens, and Adiantum viridimontanum.

[0048] In some embodiments the nucleic acid molecule encoding the PtIP-83 polypeptide is derived from a fern species in the Order Polypodiales, Family Aspleniaceae, Genus Asplenium.

[0049] In some embodiments the nucleic acid molecule encoding the PtIP-83 polypeptide is derived from a fern species in the Order Polypodiales, Family Aspleniaceae, Genus Aspleniuml selected from but not limited to Asplenium adiantum, Asplenium adulterinum, Asplenium aequibasis, Asplenium aethiopicum, Asplenium africanum, Asplenium x altemifolium, Asplenium angustum, Asplenium antiquum, Asplenium ascensionis, Asplenium attenuatum, Asplenium aureum, Asplenium auritum, Asplenium australasicum, Asplenium azoricum, Asplenium bifrons, Asplenium billottii, Asplenium bipinnatifidum, Asplenium brachycarpum, Asplenium bradleyi, Asplenium bulbiferum, Asplenium caudatum, Asplenium ceterach, Asplenium compressum, Asplenium congestum, Asplenium corderoanum, Asplenium crinicaule, Asplenium cristatum, Asplenium cuneifolium, Asplenium cymbifolium, Asplenium daghestanicum, Asplenium dalhousiae, Asplenium dareoides, Asplenium daucifolium, Asplenium difforme, Asplenium fissum, Asplenium dimorphum, Asplenium divaricatum, Asplenium dregeanum, Asplenium x ebenoides, Asplenium ecuadorense, Asplenium feei Kunze, Asplenium fissum, Asplenium flabellifolium, Asplenium flaccidum, Asplenium fontanum, Asplenium foisiense, Asplenium formosum, Asplenium gemmiferum, Asplenium x germanicum, Asplenium gueinzii, Asplenium goudeyi, Asplenium hemionitis, Asplenium hermannii-chrstii, Asplenium hookerianum, Asplenium hybridum, Asplenium incisum, Asplenium x jacksonii, Asplenium x kenzoi, Asplenium laciniatum, Asplenium lamprophyllum, Asplenium laserpitiifolium, Asplenium lepidum, Asplenium lister, Asplenium longissimum, Asplenium lucidum, Asplenium lunulatum, Asplenium lyallii, Asplenium macedonicum, Asplenium majorcum, Asplenium marinum, Asplenium x microdon, Asplenium milnei, Asplenium montanum, Asplenium musifolium, Asplenium nidus, Asplenium normale, Asplenium obliquum, Asplenium oblongifolium, Asplenium obovatum, Asplenium obtusatum, Asplenium oligolepidum, Asplenium oligophlebium, Asplenium onopteris, Asplenium pacificum, Asplenium paleaceum, Asplenium palmer, Asplenium petrarchae, Asplenium pinnatifidum, Asplenium planicaule, Asplenium platybasis, Asplenium platyneuron, Asplenium polyodon, Asplenium praemorsum, Asplenium prolongatum, Asplenium pteridoides, Asplenium resiliens, Asplenium rhizophyllum, Asplenium richardii, Asplenium ruprechtii, Asplenium ruta-muraria, Asplenium rustifolium, Asplenium sagittatum, Asplenium sandersonii, Asplenium x samiense, Asplenium schizotrichum, Asplenium schweinfurthii, Asplenium scleroprum, Asplenium scolopendrum (syn. Phyllitis scolopendrium), Asplenium seelosii, Asplenium septentrionale, Asplenium septentrionale x trichomanes, Asplenium serra, Asplenium serratum, Asplenium sessilifolium, Asplenium shuttleworthianum, Asplenium simplicifrons, Asplenium splendens, Asplenium surrogatum, Asplenium tenerum, Asplenium terrestre, Asplenium theciferum, Asplenium thunbergii, Asplenium trichomanes, Asplenium tutwilerae, Asplenium vespertinum, Asplenium vieillardii, Asplenium virens, Asplenium viride, Asplenium vittiforme, and Asplenium viviparum.

[0050] In some embodiments the nucleic acid molecule encoding the PtIP-83 polypeptide is derived from a fern species in the Order Polypodiales, Family Blechnaceae, Genus Blecnum.

[0051] In some embodiments the nucleic acid molecule encoding the PtIP-83 polypeptide is derived from a fern species in the Order Polypodiales, Family Dryopteridaceae Genus Acrophorus, Genus Acrorumohra, Genus Anapausia, Genus Arachniodes, Genus Bolbitis, Genus Ctenitis, Genus Cyclodium, Genus Cyrtogonellum, Genus Cyrtomidictyum, Genus Cyrtomium, Genus Diacalpe, Genus Didymochlaena, Genus Dryopsis, Genus Dryopteris, Genus Elaphoglossum, Genus Hypodematium, Genus Lastreopsis, Genus Leptorumohra, Genus Leucostegia, Genus Lithostegia, Genus Lomagramma, Genus Maxonia, Genus Megalastrum, Genus Olfersia, Genus Peranema, Genus Phanerophlebia, Genus Phanerophlebiopsis, Genus Polybotrya, Genus Polystichopsis, Genus Polystichum, Genus Rumohra, Genus Sorolepidium, Genus Stigmatopteris or Genus Teratophyllum.

[0052] In some embodiments the nucleic acid molecule encoding the PtIP-83 polypeptide is derived from a fern species in the Order Polypodiales, Family Dryopteridaceae, Genus Polystichum. In some embodiments the nucleic acid molecule encoding the PtIP-83 polypeptide is derived from a fern species in the Order Polypodiales, Family Dryopteridaceae, Genus Polystichum selected from but not limited to Polystichum acanthophyllum, Polystichum acrostichoides, Polystichum aculeatum, Polystichum acutidens, Polystichum acutipinnulum, Polystichum alcicome, Polystichum aleuticum, Polystichum andersonii, Polystichum atkinsonii, Polystichum australiense, Polystichum bakerianum, Polystichum biaristatum, Polystichum bomiense, Polystichum bonseyi, Polystichum brachypterum, Polystichum braunii, Polystichum brachypterum, Polystichum calderonense, Polystichum califomicum, Polystichum capillipes, Polystichum castaneum, Polystichum chilense, Polystichum christii Ching, Polystichum chunii Ching, Polystichum craspedosorum, Polystichum cyclolobum, Polystichum cystostegia, Polystichum deltodon, Polystichum dielsii, Polystichum discretum, Polystichum drepanum, Polystichum dudleyi, Polystichum duthiei, Polystichum echinatum, Polystichum erosum, Polystichum excellens, Polystichum eximium, Polystichum falcatipinnum, Polystichum falcinellum, Polystichum fallax, Polystichum formosanum, Polystichum gongboense, Polystichum grandifrons, Polystichum gymnocarpium, Polystichum haleakalense, Polystichum hancockii, Polystichum hecatopteron, Polystichum herbaceum, Polystichum imbricans, Polystichum incongruum, Polystichum kruckebergii, Polystichum kwakiutlii, Polystichum lachenense, Polystichum lanceolatum, Polystichum lemmonii, Polystichum lentum, Polystichum lonchitis, Polystichum longidens, Polystichum longipaleatum, Polystichum longipes, Polystichum luctuosum, Polystichum macleae, Polystichum macrochlaenum, Polystichum makinoi, Polystichum martini, Polystichum mayebarae, Polystichum mediocre, Polystichum medogense, Polystichum microchlamys, Polystichum mohrioides, Polystichum mollissimum, Polystichum monticola, Polystichum moorei, Polystichum morii, Polystichum moupinense, Polystichum muricatum, Polystichum nakenense, Polystichum neolobatum, Polystichum nepalense, Polystichum ningshenense, Polystichum obliquum, Polystichum omeiense, Polystichum ordinatum, Polystichum orientalitibeticum, Polystichum paramoupinense, Polystichum parvipinnulum, Polystichum piceopaleaceum, Polystichum polyblepharum, Polystichum prescottianum, Polystichum prionolepis, Polystichum proliferum, Polystichum pseudocastaneum, Polystichum pseudomakinoi, Polystichum punctiferum, Polystichum pungens, Polystichum qamdoense, Polystichum retrosopaleaceum, Polystichum rhombiforme, Polystichum rhomboidea, Polystichum richardii, Polystichum rigens, Polystichum rotundilobum, Polystichum scopulinum, Polystichum semifertile, Polystichum setiferum, Polystichum setigerum, Polystichum shensiense, Polystichum silvaticum, Polystichum simplicipinnum, Polystichum sinense, Polystichum squarrosum, Polystichum stenophyllum, Polystichum stimulans, Polystichum submite, Polystichum tacticopterum, Polystichum thomsoni, Polystichum tibeticum, Polystichum transvaalense, Polystichum tripteron, Polystichum tsus-simense, Polystichum vestitum, Polystichum wattii, Polystichum whiteleggei, Polystichum xiphophyllum, Polystichum yadongense, and Polystichum yunnanense.

[0053] In some embodiments the nucleic acid molecule encoding the PtIP-83 polypeptide is derived from a fern species in the Order Polypodiales, Family Dryopteridaceae, Genus Rumohra. In some embodiments the nucleic acid molecule encoding the PtIP-83 polypeptide is derived from a fern species in the Order Polypodiales, Family Dryopteridaceae, Genus Rumohra selected from but not limited to Rumohra adiantiformis, Rumohra aristata, Rumohra bartonae, Rumohra berteroana, Rumohra capuronii, Rumohra glandulosa, Rumohra humbertii, Rumohra linearisquamosa, Rumohra lokohensis, Rumohra madagascarica, and Rumohra quadrangularis.

[0054] In some embodiments the nucleic acid molecule encoding the PtIP-83 polypeptide is derived from a fern species in the Order Polypodiales, Family Polypodiaceae Genus Campyloneurum, Genus Drynaria, Genus Lepisorus, Genus Microgramma, Genus Microsorum, Genus Neurodium, Genus Niphidium, Genus Pecluma M. G., Genus Phlebodium, Genus Phymatosorus, Genus Platycerium, Genus Pleopeltis, Genus Polypodium.

[0055] In some embodiments the PtIP-83 polypeptide is derived from a fern species in the Order Polypodiales, Family Polypodiaceae, Genus Microsorum.

[0056] In some embodiments the nucleic acid molecule encoding the PtIP-83 polypeptide is derived from a fern species in the Order Polypodiales, Family Polypodiaceae, Genus Microsorum. selected from but not limited to Microsorum alatum, Microsorum angustifolium, Microsorum aurantiacum, Microsorum australiense, Microsorum baithoense, Microsorum basicordatum, Microsorum biseriatum, Microsorum brassii, Microsorum buergerianum, Microsorum chapaense, Microsorum cinctum, Microsorum commutatum, Microsorum congregatifolium, Microsorum cuneatum, Microsorum cuspidatum, Microsorum dengii, Microsorum egregium, Microsorum emeiensis, Microsorum ensatum, Microsorum ensiforme, Microsorum excelsum, Microsorum fortunei, Microsorum griseorhizoma, Microsorum grossum, Microsorum hemionitideum, Microsorum henryi, Microsorum heterocarpum, Microsorum heterolobum, Microsorum howense, Microsorum insigne, Microsorum intermedium, Microsorum kongtingense, Microsorum krayanense, Microsorum lanceolatum, Microsorum lancifolium, Microsorum lastii, Microsorum latilobatum, Microsorum leandrianum, Microsorum lineare, Microsorum linguiforme, Microsorum longissimum, Microsorum longshengense, Microsorum maculosum, Microsorum maximum, Microsorum membranaceum, Microsorum membranifolium, Microsorum microsorioides, Microsorum minor, Microsorum monstrosum, Microsorum muliense, Microsorum mutense, Microsorum nanchuanense, Microsorum ningpoense, Microsorum normale, Microsorum novae-zealandiae, Microsorum ovalifolium, Microsorum ovatum, Microsorum palmatopedatum, Microsorum pappei, Microsorum papuanum, Microsorum parksii, Microsorum pentaphyllum, Microsorum piliferum, Microsorum pitcaimense, Microsorum powellii, Microsorum pteropodum, Microsorum pteropus, Microsorum punctatum, Microsorum pustulatum, Microsorum rampans, Microsorum revolutum, Microsorum rubidum, Microsorum samarense, Microsorum sapaense, Microsorum sarawakense, Microsorum scandens, Microsorum scolopendria, Microsorum sibomense, Microsorum sinense, Microsorum sopuense, Microsorum spectrum, Microsorum steerei, Microsorum subhemionitideum, Microsorum submarginale, Microsorum subnudum, Microsorum superficiale, Microsorum takhtajanii, Microsorum tenuipes, Microsorum tibeticum, Microsorum triglossum, Microsorum truncatum, Microsorum tsaii, Microsorum varians, Microsorum venosum, Microsorum vieillardii, Microsorum x inaequibasis, Microsorum yiliangensis, and Microsorum zippelii.

[0057] In some embodiments the nucleic acid molecule encoding the PtIP-83 polypeptide is derived from a fern species in the Order Polypodiales, Family Polypodiaceae, Genus Polypodium L. In some embodiments the nucleic acid molecule encoding the PtIP-83 polypeptide is derived from a fern species in the Order Polypodiales, Family Polypodiaceae, Genus Polypodium L. selected from but not limited to Polypodium absidatum, Polypodium acutifolium, Polypodium adiantiforme, Polypodium aequale, Polypodium affine, Polypodium albidopaleatum, Polypodium alcicorne, Polypodium alfarii, Polypodium alfredii, Polypodium alfredii var. curtii, Polypodium allosuroides, Polypodium alsophilicola, Polypodium amamianum, Polypodium amoenum, Polypodium amorphum, Polypodium anetioides, Polypodium anfractuosum, Polypodium anguinum, Polypodium angustifolium f. remotifolia, Polypodium angustifolium var. amphostenon, Polypodium angustifolium var. heterolepis, Polypodium angustifolium var. monstrosa, Polypodium angustipaleatum, Polypodium angustissimum, Polypodium anisomeron var. pectinatum, Polypodium antioquianum, Polypodium aoristisorum, Polypodium apagolepis, Polypodium apicidens, Polypodium apiculatum, Polypodium apoense, Polypodium appalachianum, Polypodium appressum, Polypodium arenarium, Polypodium argentinum, Polypodium argutum, Polypodium armatum, Polypodium aromaticum, Polypodium aspersum, Polypodium assurgens, Polypodium atrum, Polypodium auriculatum, Polypodium balaonense, Polypodium balliviani, Polypodium bamleri, Polypodium bangii, Polypodium bartlettii, Polypodium basale, Polypodium bemoullii, Polypodium biauritum, Polypodium bifrons, Polypodium blepharodes, Polypodium bolivari, Polypodium bolivianum, Polypodium bolobense, Polypodium bombycinum, Polypodium bombycinum var. insularum, Polypodium bradeorum, Polypodium bryophilum, Polypodium bryopodum, Polypodium buchtienii, Polypodium buesii, Polypodium bulbotrichum, Polypodium caceresii, Polypodium califomicum f. brauscombii, Polypodium califomicum f. parsonsiae, Polypodium californicum, Polypodium calophlebium, Polypodium calvum, Polypodium camptophyllarium var. abbreviatum, Polypodium capitellatum, Polypodium carpinterae, Polypodium chachapoyense, Polypodium chartaceum, Polypodium chimantense, Polypodium chiricanum, Polypodium choquetangense, Polypodium christensenii, Polypodium christii, Polypodium chrysotrichum, Polypodium ciliolepis, Polypodium cinerascens, Polypodium collinsii, Polypodium colysoides, Polypodium confluens, Polypodium conforme, Polypodium confusum, Polypodium congregatifolium, Polypodium connellii, Polypodium consimile var. bourgaeanum, Polypodium consimile var. minor, Polypodium conterminans, Polypodium contiguum, Polypodium cookii, Polypodium coriaceum, Polypodium coronans, Polypodium costaricense, Polypodium costatum, Polypodium crassifolium f. angustissimum, Polypodium crassifolium var. longipes, Polypodium crassulum, Polypodium craterisorum, Polypodium cryptum, Polypodium crystalloneuron, Polypodium cucullatum var. planum, Polypodium cuencanum, Polypodium cumingianum, Polypodium cupreolepis, Polypodium curranii, Polypodium curvans, Polypodium cyathicola, Polypodium cyathisorum, Polypodium cyclocolpon, Polypodium daguense, Polypodium damunense, Polypodium dareiformioides, Polypodium dasypleura, Polypodium decipiens, Polypodium decorum, Polypodium delicatulum, Polypodium deltoideum, Polypodium demeraranum, Polypodium denticulatum, Polypodium diaphanum, Polypodium dilatatum, Polypodium dispersum, Polypodium dissectum, Polypodium dissimulans, Polypodium dolichosorum, Polypodium dolorense, Polypodium donnell-smithii, Polypodium drymoglossoides, Polypodium ebeninum, Polypodium eggersii, Polypodium elmeri, Polypodium elongatum, Polypodium enterosoroides, Polypodium erubescens, Polypodium erythrolepis, Polypodium erythrotrichum, Polypodium eurybasis, Polypodium eurybasis var. villosum, Polypodium exomans, Polypodium falcoideum, Polypodium fallacissimum, Polypodium farinosum, Polypodium faucium, Polypodium feei, Polypodium ferrugineum, Polypodium feuillei, Polypodium firmulum, Polypodium firmum, Polypodium flaccidum, Polypodium flagellare, Polypodium flexuosum, Polypodium flexuosum var. ekmanii, Polypodium forbesii, Polypodium formosanum, Polypodium fraxinifolium subsp. articulatum, Polypodium fraxinifolium subsp. luridum, Polypodium fructuosum, Polypodium fucoides, Polypodium fulvescens, Polypodium galeottii, Polypodium glaucum, Polypodium glycyrrhiza, Polypodium gracillimum, Polypodium gramineum, Polypodium grandifolium, Polypodium gratum, Polypodium graveolens, Polypodium griseo-nigrum, Polypodium griseum, Polypodium guttatum, Polypodium haalilioanum, Polypodium hammatisorum, Polypodium hancockii, Polypodium haplophlebicum, Polypodium harrisii, Polypodium hastatum var. simplex, Polypodium hawaiiense, Polypodium heanophyllum, Polypodium helleri, Polypodium hemionitidium, Polypodium henryi, Polypodium herzogii, Polypodium hesperium, Polypodium hessii, Polypodium hombersleyi, Polypodium hostmannii, Polypodium humile, Polypodium hyalinum, Polypodium iboense, Polypodium induens var. subdentatum, Polypodium insidiosum, Polypodium insigne, Polypodium intermedium subsp. masafueranum var. obtuseserratum, Polypodium intramarginale, Polypodium involutum, Polypodium itatiayense, Polypodium javanicum, Polypodium juglandifolium, Polypodium kaniense, Polypodium knowltoniorum, Polypodium kyimbilense, Polypodium I'herminieri var. costaricense, Polypodium lachniferum f. incurvata, Polypodium lachniferum var. glabrescens, Polypodium lachnopus, Polypodium lanceolatum var. complanatum, Polypodium lanceolatum var. trichophorum, Polypodium latevagans, Polypodium laxifrons, Polypodium laxifrons var. lividum, Polypodium lehmannianum, Polypodium leiorhizum, Polypodium leptopodon, Polypodium leuconeuron var. angustifolia, Polypodium leuconeuron var. latifolium, Polypodium leucosticta, Polypodium limulum, Polypodium lindigii, Polypodium lineatum, Polypodium lomarioides, Polypodium longifrons, Polypodium loretense, Polypodium loriceum var. umbraticum, Polypodium loriforme, Polypodium loxogramme f. gigas, Polypodium ludens, Polypodium luzonicum, Polypodium lycopodioides f. obtusum, Polypodium lycopodioides L., Polypodium macrolepis, Polypodium macrophyllum, Polypodium macrosorum, Polypodium macrosphaerum, Polypodium maculosum, Polypodium madrense, Polypodium manmeiense, Polypodium margaritiferum, Polypodium maritimum, Polypodium martensii, Polypodium mayoris, Polypodium megalolepis, Polypodium melanotrichum, Polypodium menisciifolium var. pubescens, Polypodium meniscioides, Polypodium merrillii, Polypodium mettenii, Polypodium mexiae, Polypodium microsorum, Polypodium militare, Polypodium minimum, Polypodium minusculum, Polypodium mixtum, Polypodium mollendense, Polypodium mollissimum, Polypodium moniliforme var. minus, Polypodium monoides, Polypodium monticola, Polypodium montigenum, Polypodium moritzianum, Polypodium moultonii, Polypodium multicaudatum, Polypodium multilineatum, Polypodium multisorum, Polypodium munchii, Polypodium muscoides, Polypodium myriolepis, Polypodium myriophyllum, Polypodium myriotrichum, Polypodium nematorhizon, Polypodium nemorale, Polypodium nesioticum, Polypodium nigrescentium, Polypodium nigripes, Polypodium nigrocinctum, Polypodium nimbatum, Polypodium nitidissimum, Polypodium nitidissimum var. latior, Polypodium nubrigenum, Polypodium oligolepis, Polypodium oligosorum, Polypodium oligosorum, Polypodium olivaceum, Polypodium olivaceum var. elatum, Polypodium oodes, Polypodium oosphaerum, Polypodium oreophilum, Polypodium ornatissimum, Polypodium ornatum, Polypodium ovatum, Polypodium oxylobum, Polypodium oxypholis, Polypodium pakkaense, Polypodium pallidum, Polypodium palmatopedatum, Polypodium palmeri, Polypodium panamense, Polypodium parvum, Polypodium patagonicum, Polypodium paucisorum, Polypodium pavonianum, Polypodium pectinatum var. caliense, Polypodium pectinatum var. hispidum, Polypodium pellucidum, Polypodium pendulum var. boliviense, Polypodium percrassum, Polypodium perpusillum, Polypodium peruvianum var. subgibbosum, Polypodium phyllitidis var. elongatum, Polypodium pichinchense, Polypodium pilosissimum, Polypodium pilosissimum var. glabriusculum, Polypodium pilossimum var. tunguraquensis, Polypodium pityrolepis, Polypodium platyphyllum, Polypodium playfairii, Polypodium plebeium var. cooperi, Polypodium plectolepidioides, Polypodium pleolepis, Polypodium plesiosorum var.i, Polypodium podobasis, Polypodium podocarpum, Polypodium poloense, Polypodium polydatylon, Polypodium polypodioides var. aciculare, Polypodium polypodioides var. michauxianum, Polypodium praetermissum, Polypodium preslianum var. immersum, Polypodium procerum, Polypodium procerum, Polypodium productum, Polypodium productum, Polypodium prolongilobum, Polypodium propinguum, Polypodium proteus, Polypodium pruinatum, Polypodium pseudocapillare, Polypodium pseudofraternum, Polypodium pseudonutans, Polypodium pseudoserratum, Polypodium pulcherrimum, Polypodium pulogense, Polypodium pungens, Polypodium purpusii, Polypodium radicale, Polypodium randallii, Polypodium ratiborii, Polypodium reclinatum, Polypodium recreense, Polypodium repens var. abruptum, Polypodium revolvens, Polypodium rhachipterygium, Polypodium rhomboideum, Polypodium rigens, Polypodium robustum, Polypodium roraimense, Polypodium roraimense, Polypodium rosei, Polypodium rosenstockii, Polypodium rubidum, Polypodium rudimentum, Polypodium rusbyi, Polypodium sablanianum, Polypodium sarmentosum, Polypodium saxicola, Polypodium schenckii, Polypodium schlechteri, Polypodium scolopendria, Polypodium scolopendria, Polypodium scolopendrium, Polypodium scouleri, Polypodium scutulatum, Polypodium segregatum, Polypodium semihirsutum, Polypodium semihirsutum var. fuscosetosum, Polypodium senile var. minor, Polypodium sericeolanatum, Polypodium serraeforme, Polypodium serricula, Polypodium sesquipedala, Polypodium sessilifolium, Polypodium setosum var. calvum, Polypodium setulosum, Polypodium shaferi, Polypodium sibomense, Polypodium siccum, Polypodium simacense, Polypodium simulans, Polypodium singer, Polypodium sinicum, Polypodium sintenisii, Polypodium skutchii, Polypodium sloanei, Polypodium sodiroi, Polypodium sordidulum, Polypodium sordidum, Polypodium sphaeropteroides, Polypodium sphenodes, Polypodium sprucei, Polypodium sprucei var. furcativenosa, Polypodium steirolepis, Polypodium stenobasis, Polypodium stenolepis, Polypodium stenopterum, Polypodium subcapillare, Polypodium subflabelliforme, Polypodium subhemionitidium, Polypodium subinaequale, Polypodium subintegrum, Polypodium subspathulatum, Polypodium subtile, Polypodium subvestitum, Polypodium subviride, Polypodium superficiale var. attenuatum, Polypodium superficiale var. chinensis, Polypodium sursumcurrens, Polypodium tablazianum, Polypodium taenifolium, Polypodium tamandarei, Polypodium tatei, Polypodium tenuiculum var. acrosora, Polypodium tenuiculum var. brasiliense, Polypodium tenuilore, Polypodium tenuinerve, Polypodium tepuiense, Polypodium teresae, Polypodium tetragonum var. incompletum, Polypodium thysanolepis var. bipinnatifidum, Polypodium thyssanolepis, var. thyssanolepis, Polypodium thyssanolepsi, Polypodium tobagense, Polypodium trichophyllum, Polypodium tridactylum, Polypodium tridentatum, Polypodium trifurcatum var. brevipes, Polypodium triglossum, Polypodium truncatulum, Polypodium truncicola var. major, Polypodium truncicola var. minor, Polypodium tuberosum, Polypodium tunguraguae, Polypodium turquinum, Polypodium turrialbae, Polypodium ursipes, Polypodium vagans, Polypodium valdealatum, Polypodium versteegii, Polypodium villagranii, Polypodium virginianum f. cambroideum, Polypodium virginianum f. peraferens, Polypodium vittarioides, Polypodium vulgare, Polypodium vulgare L., Polypodium vulgare subsp. oreophilum, Polypodium vulgare var. acuminatum, Polypodium vulpinum, Polypodium williamsii, Polypodium wobbense, Polypodium x fallacissimum-guttatum, Polypodium xantholepis, Polypodium xiphopteris, Polypodium yarumalense, Polypodium yungense, and Polypodium zosteriforme.

[0058] In some embodiments the nucleic acid molecule encoding the PtIP-83 polypeptide is derived from a fern species in the Order Polypodiales, Family Polypodiaceae, Genus Platycerium.

[0059] In some embodiments the nucleic acid molecule encoding the PtIP-83 polypeptide is derived from a species in the Division Lycophyta. The phylogeny of extant Lycopods as used herein is based on the classification by N. Wikstrom, American Fern Journal, 91:150-156 (2001). Other phylogenic classifications of extant Lycopods are known to one skilled in the art. Additional information on the phylogeny of ferns can be found at mobot.org/MOBOT/research/APweb/ (which can be accessed using the “www” prefix) and Schuettpelz E. and Pryer K. M., TAXON 56: 1037-1050 (2007) based on three plastid genes. Additional Lycopod species can be found at homepages.caverock.net.nz/˜bj/fern/list.htm (which can be accessed using the http://prefix).

[0060] In some embodiments the nucleic acid molecule encoding the PtIP-83 polypeptide is derived from a species in the Class Isoetopsida or Class Lycopodiopsida.

[0061] In some embodiments the nucleic acid molecule encoding the PtIP-83 polypeptide is derived from a species in the Class Isoetopsida, Order Selaginales. In some embodiments the nucleic acid molecule encoding the PtIP-83 polypeptide is derived from a fern species in the Class Isoetopsida, Order Selaginales, Family Selaginellaceae. In some embodiments the nucleic acid molecule encoding the PtIP-83 polypeptide is derived from a species in the Genus Selaginella.

[0062] In some embodiments the nucleic acid molecule encoding the PtIP-83 polypeptide is derived from a species in the Class Lycopodiopsida, Order Lycopodiales. In some embodiments the nucleic acid molecule encoding the PtIP-83 polypeptide is derived from a fern species in the Class Lycopodiopsida, Order Lycopodiales Family Lycopodiaceae or Family Huperziaceae. In some embodiments the nucleic acid molecule encoding the PtIP-83 polypeptide is derived from a species in the Genus Austrolycopodium, Dendrolycopodium, Diphasiastrum, Diphasium, Huperzia, Lateristachys, Lycopodiastrum, Lycopodiella, Lycopodium, Palhinhaea, Pseudodiphasium, Pseudolycopodiella, Pseudolycopodium or Spinulum. In some embodiments the nucleic acid molecule encoding the PtIP-83 polypeptide is derived from a species in the Genus Lycopodium.

[0063] In some embodiments the nucleic acid molecule encodes a PtIP-83 polypeptide comprises an amino acid sequence MOTIF selected from: an amino acid sequence MOTIF 1 as represented by an amino acid sequence of the formula MP[DE]MPSEADWSIFVNE[IV]EAVAEGMPTEVSEVP[AV]WKAKCKN[MV]AALGREM[S C]I (SEQ ID NO: 646); an amino acid sequence MOTIF 2 as represented by an amino acid sequence of the formula PQLQYRMYG[NS]LI[KN]QMAQVAQNYDQ[ED]FKQ[FL]KLFI[IA]QNQI[LF]GSYLLQQN[KR]AF (SEQ ID NO: 647); an amino acid sequence MOTIF 3 as represented by an amino acid sequence of the formula NTFMQMTPFTRWRLRLSASASENA[EG]LAFPTATA[PL]DSTT[EQ][IV]VITFHVTAIR (SEQ ID NO: 648); an amino acid sequence MOTIF 4 as represented by an amino acid sequence of the formula [DN]FTSRHVVK[GD]IPVSLLLDGEDWEFEIPVQ[AG]GMSSFP (SEQ ID NO: 649); an amino acid sequence MOTIF 5 as represented by an amino acid sequence of the formula IIHQP[SA]T[RQ][ST]G[IT]VYILLQGSTIFHDRRR[DE]EVMTFQAA[DA]PLN[FY][QH]YAY RLDTG (SEQ ID NO: 650); an amino acid sequence MOTIF 6 as represented by an amino acid sequence of the formula S[HQ]ADRLAAIQP[AV]DLTN[HY]LEMAT[HQ]MDMRTT[RS][MI]L[IL]GLLN[MI]LRIQNAA LMYEY (SEQ ID NO: 651); an amino acid sequence MOTIF 7 as represented by an amino acid sequence of the formula [VL]DRVEFSEVMVIHRMYVRL[SA]DL[ND]VGEL[PE]GA[EG][RK]VKR[VL]YV[FL]ADVV E (SEQ ID NO: 652); an amino acid sequence MOTIF 8 as represented by an amino acid sequence of the formula A[DE]RELQMESFHSAVISQRRQEL[ND]TA[IF]AKM[DE]R[LM]SLQMEEE[NS]RAMEQA QKEM (SEQ ID NO: 653); an amino acid sequence MOTIF 9 as represented by an amino acid sequence of the formula FVTAGATAPGA[AV]ASAGQAVSIAGQAAQ[AG]LRRVVEILE[GQ]LEAVMEVVAA[VI]K (SEQ ID NO: 654); an amino acid sequence MOTIF 10 as represented by an amino acid sequence of the formula DGMNWG[IT]YI[YH]GE[KE]V[EQ]RSPLLPSNAILAVWADRC[TI]ITSARHNH[VF]NAPGR [IV]I (SEQ ID NO: 655); an amino acid sequence MOTIF 11 as represented by an amino acid sequence of the formula [KV][VK][CA]RPPSPDM[MV]SAVAEHALWLNDVLLQVVQ[KN]ESQ[LM]QGT[AE]PYNE CLALLGR (SEQ ID NO: 656); an amino acid sequence MOTIF 12 as represented by an amino acid sequence of the formula PTELT[VA]WPLGMDTV[AG]NLLIAQENAAL[VL]GLIQLGPSS (SEQ ID NO: 657); an amino acid sequence MOTIF 13 as represented by an amino acid sequence of the formula RDQ[MT][HQ]MPGSVTVI[IV]LCRLLQFP[IT]DGSQA[TA]T (SEQ ID NO: 658); an amino acid sequence MOTIF 14 as represented by an amino acid sequence of the formula TSIPVEVVTDP[SN]ILLGMQTTV[LH]IAEL (SEQ ID NO: 659); an amino acid sequence MOTIF 15 as represented by an amino acid sequence of the formula EGLR[EQ]FQNRQVARA[VL]FAVLKAVA[MQ]I[AG](SEQ ID NO: 660); an amino acid sequence MOTIF 16 as represented by an amino acid sequence of the formula W[TS]RVRIRHLEM[QH]F[AV]QEASG (SEQ ID NO: 661); an amino acid sequence MOTIF 17 as represented by an amino acid sequence of the formula QISELQY[ED]IWVQG[LM][ML]RDIA (SEQ ID NO: 662); an amino acid sequence MOTIF 18 as represented by an amino acid sequence of the formula TFTLGSGVTGITSMHGEPSLDPWNGVSLDSASPTAF (SEQ ID NO: 663); an amino acid sequence MOTIF 19 as represented by an amino acid sequence of the formula MDYSTLYRDLNQIS (SEQ ID NO: 664); an amino acid sequence MOTIF 20 as represented by an amino acid sequence of the formula LRLPFM[QK]LHARVIEQN[VR]K[SE](SEQ ID NO: 665); an amino acid sequence MOTIF 21 as represented by an amino acid sequence of the formula VDSLEQVG[QH][IL]V[GD]AP (SEQ ID NO: 666); an amino acid sequence MOTIF 22 as represented by an amino acid sequence of the formula [IV][EQ][CA]VMK[IM]GRF[VG][SL]VV (SEQ ID NO: 667); an amino acid sequence MOTIF 23 as represented by an amino acid sequence of the formula TLTNEPSE[EQ]F (SEQ ID NO: 668); and an amino acid sequence MOTIF 24 as represented by an amino acid sequence of the formula LPRQSRNISF (SEQ ID NO: 669).

[0064] In some embodiments the nucleic acid molecule encodes a PtIP-83 polypeptide comprises an amino acid sequence MOTIF selected from: an amino acid sequence MOTIF 1 having at least 90% sequence identity to the amino acid sequence as represented by the formula MP[DE]MPSEADWSIFVNE[IV]EAVAEGMPTEVSEVP[AV]WKAKCKN[MV]AALGREM[S C]I (SEQ ID NO: 646); an amino acid sequence MOTIF 2 having at least 90% sequence identity to the amino acid sequence as represented by the formula PQLQYRMYG[NS]LI[KN]QMAQVAQNYDQ[ED]FKQ[FL]KLFI[IA]QNQI[LF]GSYLLQQN[KR]AF (SEQ ID NO: 647); an amino acid sequence MOTIF 3 having at least 90% sequence identity to the amino acid sequence as represented by the formula NTFMQMTPFTRWRLRLSASASENA[EG]LAFPTATA[PL]DSTT[EQ][IV]VITFHVTAIR (SEQ ID NO: 648); an amino acid sequence MOTIF 4 having at least 90% sequence identity to the amino acid sequence as represented by the formula [DN]FTSRHVVK[GD]IPVSLLLDGEDWEFEIPVQ[AG]GMSSFP (SEQ ID NO: 649); an amino acid sequence MOTIF 5 having at least 90% sequence identity to the amino acid sequence as represented by the formula IIHQP[SA]T[RQ][ST]G[IT]VYILLQGSTIFHDRRR[DE]EVMTFQAA[DA]PLN[FY][QH]YAY RLDTG (SEQ ID NO: 650); an amino acid sequence MOTIF 6 having at least 90% sequence identity to the amino acid sequence as represented by the formula S[HQ]ADRLAAIQP[AV]DLTN[HY]LEMAT[HQ]MDMRTT[RS][MI]L[IL]GLLN[MI]LRIQNAA LMYEY (SEQ ID NO: 651); an amino acid sequence MOTIF 7 having at least 90% sequence identity to the amino acid sequence as represented by the formula [VL]DRVEFSEVMVIHRMYVRL[SA]DL[ND]VGEL[PE]GA[EG][RK]VKR[VL]YV[FL]ADVV E (SEQ ID NO: 652); an amino acid sequence MOTIF 8 having at least 90% sequence identity to the amino acid sequence as represented by the formula A[DE]RELQMESFHSAVISQRRQEL[ND]TA[IF]AKM[DE]R[LM]SLQMEEE[NS]RAMEQA QKEM (SEQ ID NO: 653); an amino acid sequence MOTIF 9 having at least 90% sequence identity to the amino acid sequence as represented by the formula FVTAGATAPGA[AV]ASAGQAVSIAGQAAQ[AG]LRRVVEILE[GQ]LEAVMEVVAA[VI]K (SEQ ID NO: 654); an amino acid sequence MOTIF 10 having at least 90% sequence identity to the amino acid sequence as represented by the formula DGMNWG[IT]YI[YH]GE[KE]V[EQ]RSPLLPSNAILAVWADRC[TI]ITSARHNH[VF]NAPGR [IV]I (SEQ ID NO: 655); an amino acid sequence MOTIF 11 having at least 90% sequence identity to the amino acid sequence as represented by the formula [KV][VK][CA]RPPSPDM[MV]SAVAEHALWLNDVLLQVVQ[KN]ESQ[LM]QGT[AE]PYNE CLALLGR (SEQ ID NO: 656); an amino acid sequence MOTIF 12 having at least 90% sequence identity to the amino acid sequence as represented by the formula PTELT[VA]WPLGMDTV[AG]NLLIAQENAAL[VL]GLIQLGPSS (SEQ ID NO: 657); an amino acid sequence MOTIF 13 having at least 90% sequence identity to the amino acid sequence as represented by the formula RDQ[MT][HQ]MPGSVTVI[IV]LCRLLQFP[IT]DGSQA[TA]T (SEQ ID NO: 658); an amino acid sequence MOTIF 14 having at least 90% sequence identity to the amino acid sequence as represented by the formula TSIPVEVVTDP[SN]ILLGMQTTV[LH]IAEL (SEQ ID NO: 659); an amino acid sequence MOTIF 15 having at least 90% sequence identity to the amino acid sequence as represented by the formula EGLR[EQ]FQNRQVARA[VL]FAVLKAVA[MQ]I[AG](SEQ ID NO: 660); an amino acid sequence MOTIF 16 having at least 90% sequence identity to the amino acid sequence as represented by the formula W[TS]RVRIRHLEM[QH]F[AV]QEASG (SEQ ID NO: 661); an amino acid sequence MOTIF 17 having at least 90% sequence identity to the amino acid sequence as represented by the formula QISELQY[ED]IWVQG[LM][ML]RDIA (SEQ ID NO: 662); an amino acid sequence MOTIF 18 having at least 90% sequence identity to the amino acid sequence as represented by the formula TFTLGSGVTGITSMHGEPSLDPWNGVSLDSASPTAF (SEQ ID NO: 663); an amino acid sequence MOTIF 19 having at least 90% sequence identity to the amino acid sequence as represented by the formula MDYSTLYRDLNQIS (SEQ ID NO: 664); an amino acid sequence MOTIF 20 having at least 90% sequence identity to the amino acid sequence as represented by the formula LRLPFM[QK]LHARVIEQN[VR]K[SE](SEQ ID NO: 665); an amino acid sequence MOTIF 21 having at least 90% sequence identity to the amino acid sequence as represented by the formula VDSLEQVG[QH][IL]V[GD]AP (SEQ ID NO: 666); an amino acid sequence MOTIF 22 having at least 90% sequence identity to the amino acid sequence as represented by the formula [IV][EQ][CA]VMK[IM]GRF[VG][SL]VV (SEQ ID NO: 667); an amino acid sequence MOTIF 23 having at least 90% sequence identity to the amino acid sequence as represented by the formula TLTNEPSE[EQ]F (SEQ ID NO: 668); and an amino acid sequence MOTIF 24 having at least 90% sequence identity to the amino acid sequence as represented by the formula LPRQSRNISF (SEQ ID NO: 669).

[0065] In some embodiments the nucleic acid molecule encodes a PtIP-83 polypeptide comprises an amino acid sequence MOTIF selected from: an amino acid sequence MOTIF 1 as represented by an amino acid sequence of the formula MP[DE]MP[ST][ED]ADWSIFVNE[IVL]EAVAEGMPTEVSEVP[AV]W[KR]AKCKN[MV]AA LGREM[SC]I (SEQ ID NO: 670); an amino acid sequence MOTIF 2 as represented by an amino acid sequence of the formula PQLQYRMYG[NS]LI[KRN]QMAQVAQNYD[QR][ED]FK[QR][FL][KR]LFI[IAVL]QNQI[LF]GSYLL[QE]QN[KR]AF (SEQ ID NO: 671); an amino acid sequence MOTIF 3 as represented by an amino acid sequence of the formula N[TK]FMQMTPFT[RH]WRLRLSASA[SPKA]EN[AK][EG]LAFPTATA[PL]DSTT[EQ][IV][V A]ITFHVTAIR (SEQ ID NO: 672); an amino acid sequence MOTIF 4 as represented by an amino acid sequence of the formula [DN]FTSRHVVK[GD]IPV[SN]LLLDG[EG]DWEFEIPVQ[AG]GMSSFP (SEQ ID NO: 673); an amino acid sequence MOTIF 5 as represented by an amino acid sequence of the formula IIHQP[SA]T[RQ][ST]G[IT][VI]YILLQGST[IV]FHDRRR[DE][EQ]V[ML]T[FP]QAA[DAV]PL N[FY][QH]YAYRLDTG (SEQ ID NO: 674); an amino acid sequence MOTIF 6 as represented by an amino acid sequence of the formula S[HQ]ADRLAAIQP[AV][DN]LTN[HYF]LEMAT[HQ]MDMRTT[RS][MI]L[IL]GLLN[MI][LM]RIQNAAL[MR]YEY (SEQ ID NO: 675); an amino acid sequence MOTIF 7 as represented by an amino acid sequence of the formula [VL]D[RQ]VEFSEVMVIHRMYV[N]RL[SA]DL[ND]V[GA][EQ]L[PE]GA[EG][RK]VKR[VL]Y V[FL]ADVVE (SEQ ID NO: 676); an amino acid sequence MOTIF 8 as represented by an amino acid sequence of the formula A[DE]RELQMESFH[SA]AVISQ[RK]R[QGE]EL[ND][TD][AT][IF]AKM[DE]R[LM]SLQMEE E[NSD][RG]AMEQA[QR]KEM (SEQ ID NO: 677); an amino acid sequence MOTIF 9 as represented by an amino acid sequence of the formula F[VL]TAGATAPGA[AV]ASAGQAV[SN]IAGQAAQ[AG]LRRVVEILE[GQ]LEAVMEVVAA[VI]K (SEQ ID NO: 678); an amino acid sequence MOTIF 10 as represented by an amino acid sequence of the formula D[GD][MA][NK]WG[IT]Y[IV][YH][GA]E[KE]V[EQ][RVL]SPL[LYF][PN][SNG][NW][ASP][IY]L[AGV]V[WE]A[DQ]R[CS][TI]IT[SA]A[RFM]HN[HVT][VF][ND][AER]PG[RW][IV][IR](SEQ ID NO: 679); an amino acid sequence MOTIF 11 as represented by an amino acid sequence of the formula [KV][VK][CA][RGC][PHY]PSP[DE][MIL][MV]SAV[AG][EV]HA[LIN]WL[NS][DK]VLL[QR]V VQ[KN]ES[QH][LM]QGT[AE][PSA]YNECLALLGR (SEQ ID NO: 680); an amino acid sequence MOTIF 12 as represented by an amino acid sequence of the formula [PN]T[EQ]LT[VAT]WPL[GR]MDTV[AG][ND]LLI[AT][QH]E[NS]AAL[VLS]GL[ITMA]QLG[P Q][SP]S (SEQ ID NO: 681); an amino acid sequence MOTIF 13 as represented by an amino acid sequence of the formula [RLC][DLWK][QNPR][MTP][HQR][MIL]PGSVTVI[IV]LCRLLQFP[IT][DG]G[SR][QFR][AS][TAD][TW](SEQ ID NO: 682); an amino acid sequence MOTIF 14 as represented by an amino acid sequence of the formula [TA][SGV][IL]PV[ED]VVTDP[SN]IL[LM]GMQT[TS]V[LH]IAEL (SEQ ID NO: 683); an amino acid sequence MOTIF 15 as represented by an amino acid sequence of the formula EGLR[EQ]FQN[RE]QVA[RN]A[VL]FAVL[KS][AS]VA[MQ]I[AG](SEQ ID NO: 684); an amino acid sequence MOTIF 16 as represented by an amino acid sequence of the formula W[TS]RVRIRHLEM[QH]F[AV][QK]E[AS][SM][GN](SEQ ID NO: 685); an amino acid sequence MOTIF 17 as represented by an amino acid sequence of the formula Q[IM]S[EQ]LQY[ED]IWVQG[LM][ML]RD[IM]A (SEQ ID NO: 686); an amino acid sequence MOTIF 18 as represented by an amino acid sequence of the formula TFTLGSGVTGITSMHGEPSLDPWNGVSLDSASPTAF (SEQ ID NO: 663); an amino acid sequence MOTIF 19 as represented by an amino acid sequence of the formula [MLV]DY[SK][TSK]L[YF][RE]DLNQIS (SEQ ID NO: 687); an amino acid sequence MOTIF 20 as represented by an amino acid sequence of the formula L[RHQ]L[PT]FM[QK]LHA[RIT][VQL][IR]E[QER][NF][VR][KWS][SE](SEQ ID NO: 688); an amino acid sequence MOTIF 21 as represented by an amino acid sequence of the formula V[DN][SA]L[ED]QV[GS][QH][IL]V[GD]AP (SEQ ID NO: 689); an amino acid sequence MOTIF 22 as represented by an amino acid sequence of the formula [IV][EQH][CAS][VA][MI]K[IM][GV][RP][FI][VG][SL]VV (SEQ ID NO: 690); an amino acid sequence MOTIF 23 as represented by an amino acid sequence of the formula TLTN[EQ]PSE[EQDH]F (SEQ ID NO: 691); and an amino acid sequence MOTIF 24 as represented by an amino acid sequence of the formula LP[RS]QS[RT]N[IV]SF (SEQ ID NO: 692).

[0066] In some embodiments the nucleic acid molecule encodes a PtIP-83 polypeptide comprises an amino acid sequence MOTIF selected from: an amino acid sequence MOTIF 1 having at least 90% sequence identity to the amino acid sequence as represented by the formula MP[DE]MP[ST][ED]ADWSIFVNE[IVL]EAVAEGMPTEVSEVP[AV]W[KR]AKCKN[MV]AA LGREM[SC]I (SEQ ID NO: 670); an amino acid sequence MOTIF 2 having at least 90% sequence identity to the amino acid sequence as represented by the formula PQLQYRMYG[NS]LI[KRN]QMAQVAQNYD[QR][ED]FK[QR][FL][KR]LFI[IAVL]QNQI[LF]GSYLL[QE]QN[KR]AF (SEQ ID NO: 671); an amino acid sequence MOTIF 3 having at least 90% sequence identity to the amino acid sequence as represented by the formula N[TK]FMQMTPFT[RH]WRLRLSASA[SPKA]EN[AK][EG]LAFPTATA[PL]DSTT[EQ][IV][V A]ITFHVTAIR (SEQ ID NO: 672); an amino acid sequence MOTIF 4 having at least 90% sequence identity to the amino acid sequence as represented by the formula [DN]FTSRHVVK[GD]IPV[SN]LLLDG[EG]DWEFEIPVQ[AG]GMSSFP (SEQ ID NO: 673); an amino acid sequence MOTIF 5 having at least 90% sequence identity to the amino acid sequence as represented by the formula IIHQP[SA]T[RQ][ST]G[IT][VI]YILLQGST[IV]FHDRRR[DE][EQ]V[ML]T[FP]QAA[DAV]PL N[FY][QH]YAYRLDTG (SEQ ID NO: 674); an amino acid sequence MOTIF 6 having at least 90% sequence identity to the amino acid sequence as represented by the formula S[HQ]ADRLAAIQP[AV][DN]LTN[HYF]LEMAT[HQ]MDMRTT[RS][MI]L[IL]GLLN[MI][LM]RIQNAAL[MR]YEY (SEQ ID NO: 675); an amino acid sequence MOTIF 7 having at least 90% sequence identity to the amino acid sequence as represented by the formula [VL]D[RQ]VEFSEVMVIHRMYV[N]RL[SA]DL[ND]V[GA][EQ]L[PE]GA[EG][RK]VKR[VL]Y V[FL]ADVVE (SEQ ID NO: 676); an amino acid sequence MOTIF 8 having at least 90% sequence identity to the amino acid sequence as represented by the formula A[DE]RELQMESFH[SA]AVISQ[RK]R[QGE]EL[ND][TD][AT][IF]AKM[DE]R[LM]SLQMEE E[NSD][RG]AMEQA[QR]KEM (SEQ ID NO: 677); an amino acid sequence MOTIF 9 having at least 90% sequence identity to the amino acid sequence as represented by the formula F[VL]TAGATAPGA[AV]ASAGQAV[SN]IAGQAAQ[AG]LRRVVEILE[GQ]LEAVMEVVAA[VI]K (SEQ ID NO: 678); an amino acid sequence MOTIF 10 having at least 90% sequence identity to the amino acid sequence as represented by the formula D[GD][MA][NK]WG[IT]Y[IV][YH][GA]E[KE]V[EQ][RVL]SPL[LYF][PN][SNG][NW][ASP][IY]L[AGV]V[WE]A[DQ]R[CS][TI]IT[SA]A[RFM]HN[HVT][VF][ND][AER]PG[RW][IV][IR](SEQ ID NO: 679); an amino acid sequence MOTIF 11 having at least 90% sequence identity to the amino acid sequence as represented by the formula [KV][VK][CA][RGC][PHY]PSP[DE][MIL][MV]SAV[AG][EV]HA[LIN]WL[NS][DK]VLL[QR]V VQ[KN]ES[QH][LM]QGT[AE][PSA]YNECLALLGR (SEQ ID NO: 680); an amino acid sequence MOTIF 12 having at least 90% sequence identity to the amino acid sequence as represented by the formula [PN]T[EQ]LT[VAT]WPL[GR]MDTV[AG][ND]LLI[AT][QH]E[NS]AAL[VLS]GL[ITMA]QLG[P Q][SP]S (SEQ ID NO: 681); an amino acid sequence MOTIF 13 having at least 90% sequence identity to the amino acid sequence as represented by the formula [RLC][DLWK][QNPR][MTP][HQR][MIL]PGSVTVI[IV]LCRLLQFP[IT][DG]G[SR][QFR][AS][TAD][TW](SEQ ID NO: 682); an amino acid sequence MOTIF 14 having at least 90% sequence identity to the amino acid sequence as represented by the formula [TA][SGV][IL]PV[ED]VVTDP[SN]IL[LM]GMQT[TS]V[LH]IAEL (SEQ ID NO: 683); an amino acid sequence MOTIF 15 having at least 90% sequence identity to the amino acid sequence as represented by the formula EGLR[EQ]FQN[RE]QVA[RN]A[VL]FAVL[KS][AS]VA[MQ]I[AG](SEQ ID NO: 684); an amino acid sequence MOTIF 16 having at least 90% sequence identity to the amino acid sequence as represented by the formula W[TS]RVRIRHLEM[QH]F[AV][QK]E[AS][SM][GN](SEQ ID NO: 685); an amino acid sequence MOTIF 17 having at least 90% sequence identity to the amino acid sequence as represented by the formula Q[IM]S[EQ]LQY[ED]IWVQG[LM][ML]RD[IM]A (SEQ ID NO: 686); an amino acid sequence MOTIF 18 having at least 90% sequence identity to the amino acid sequence as represented by the formula TFTLGSGVTGITSMHGEPSLDPWNGVSLDSASPTAF (SEQ ID NO: 663); an amino acid sequence MOTIF 19 having at least 90% sequence identity to the amino acid sequence as represented by the formula [MLV]DY[SK][TSK]L[YF][RE]DLNQIS (SEQ ID NO: 687); an amino acid sequence MOTIF 20 having at least 90% sequence identity to the amino acid sequence as represented by the formula L[RHQ]L[PT]FM[QK]LHA[RIT][VQL][IR]E[QER][NF][VR][KWS][SE](SEQ ID NO: 688); an amino acid sequence MOTIF 21 having at least 90% sequence identity to the amino acid sequence as represented by the formula V[DN][SA]L[ED]QV[GS][QH][IL]V[GD]AP (SEQ ID NO: 689); an amino acid sequence MOTIF 22 having at least 90% sequence identity to the amino acid sequence as represented by the formula [IV][EQH][CAS][VA][MI]K[IM][GV][RP][FI][VG][SL]VV (SEQ ID NO: 690); an amino acid sequence MOTIF 23 having at least 90% sequence identity to the amino acid sequence as represented by the formula TLTN[EQ]PSE[EQDH]F (SEQ ID NO: 691); and an amino acid sequence MOTIF 24 having at least 90% sequence identity to the amino acid sequence as represented by the formula LP[RS]QS[RT]N[IV]SF (SEQ ID NO: 692).

[0067] In some embodiments the nucleic acid molecule encodes a PtIP-83 polypeptide comprises an amino acid sequence MOTIF selected from: an amino acid sequence MOTIF 1 as represented by an amino acid sequence of the formula MP[DE]MP[ST][ED]ADWSIFVNE[IVL]EAVAEGMPTEVSEVP[AVIL]W[KR]AKCKN[MVIL]AALGREM[SCT]I (SEQ ID NO: 693); an amino acid sequence MOTIF 2 as represented by an amino acid sequence of the formula PQLQYRMYG[NS]LI[KRNQ]QMAQVAQNYD[QRNK][ED]FK[QRNK][FL][KR]LFI[IAVL]Q NQI[LFIV]GSYLL[QEND]QN[KR]AF (SEQ ID NO: 694); an amino acid sequence MOTIF 3 as represented by an amino acid sequence of the formula N[TKSR]FMQMTPFT[RHK]WRLRLSASA[SPKATR]EN[AKR][EG]LAFPTATA[PLIV]DST T[EQND][IVL][VAIL]ITFHVTAIR (SEQ ID NO: 695); an amino acid sequence MOTIF 4 as represented by an amino acid sequence of the formula [DNQE]FTSRHVVK[GDE]IPV[SNTQ]LLLDG[EGD]DWEFEIPVQ[AG]GMSSFP (SEQ ID NO: 696); an amino acid sequence MOTIF 5 as represented by an amino acid sequence of the formula IIHQP[SAT]T[RQKN][ST]G[ITLVS][VIL]YILLQGST[IVL]FHDRRR[DE][EQDN]V[MLIV]T[F P]QAA[DAVEIL]PLN[FY][QHN]YAYRLDTG (SEQ ID NO: 697); an amino acid sequence MOTIF 6 as represented by an amino acid sequence of the formula S[HQN]ADRLAAIQP[AVIL][DN]LTN[HYF]LEMAT[HQN]MDMRTT[RSKT][MILV]L[ILV]GL LN[MILV][LMIV]RIQNAAL[MRILVK]YEY (SEQ ID NO: 698); an amino acid sequence MOTIF 7 as represented by an amino acid sequence of the formula [VLI]D[RQKN]VEFSEVMVIHRMYV[N]RL[SAT]DL[NDQE]V[GA][EQND]L[PED]GA[EGD][RK]VKR[VLI]YV[FLIV]ADVVE (SEQ ID NO: 699); an amino acid sequence MOTIF 8 as represented by an amino acid sequence of the formula A[DE]RELQMESFH[SAT]AVISQ[RK]R[QGEND]EL[NDQE][TDSE][ATS][IFLV]AKM[DE]R[LMIV]SLQMEEE[NSDQET][RGK]AMEQA[QRNK]KEM (SEQ ID NO: 700); an amino acid sequence MOTIF 9 as represented by an amino acid sequence of the formula F[VLI]TAGATAPGA[AVIL]ASAGQAV[SNTQ]IAGQAAQ[AG]LRRVVEILE[GQN]LEAVME VVAA[VIL]K (SEQ ID NO: 701); an amino acid sequence MOTIF 10 as represented by an amino acid sequence of the formula D[GDE][MA][NKQK]WG[ITLVS]Y[IVL][YH][GA]E[KERD]V[EQND][RVLKI]SPL[LYFIV][P NQ][SNGTQ][NWQ][ASPT][IYLV]L[AGVIL]V[WED]A[DQNE]R[CST][TISLV]IT[SAT]A[RF MK]HN[HVTILS][VFIL][NDQE][AERDK]PG[RWK][IVL][IRLVK](SEQ ID NO: 702); an amino acid sequence MOTIF 11 as represented by an amino acid sequence of the formula [KVRIL][VKRIL][CA][RGCK][PHY]PSP[DE][MILV][MVIL]SAV[AG][EVDIL]HA[LINVQ]WL[NSQT][DKER]VLL[QRNK]VVQ[KNRQ]ES[QHN][LMIV]QGT[AED][PSAT]YNECLALLGR (SEQ ID NO: 703); an amino acid sequence MOTIF 12 as represented by an amino acid sequence of the formula [PNQ]T[EQDN]LT[VATILS]WPL[GRK]MDTV[AG][NDQE]LLI[ATS][QHN]E[NSQT]AAL[V LSIT]GL[ITMALVS]QLG[PQN][SPT]S (SEQ ID NO: 704); an amino acid sequence MOTIF 13 as represented by an amino acid sequence of the formula [RLCKIV][DLWKEIVR][QNPRK][MTP][HQR][MILV]PGSVTVI[IVL]LCRLLQFP[ITLVS][D GE]G[SRTK][QFRNK][AST][TADES][TWS](SEQ ID NO: 705); an amino acid sequence MOTIF 14 as represented by an amino acid sequence of the formula [TA][SGVTIL][ILV]PV[ED]VVTDP[SNTQ]IL[LMIV]GMQT[TS]V[LHIV]IAEL (SEQ ID NO: 706); an amino acid sequence MOTIF 15 as represented by an amino acid sequence of the formula EGLR[EQND]FQN[REKD]QVA[RNKQ]A[VLI]FAVL[KSRT][AST]VA[MQN]I[AG](SEQ ID NO: 707); an amino acid sequence MOTIF 16 as represented by an amino acid sequence of the formula W[TS]RVRIRHLEM[QHN]F[AVIL][QKNR]E[AST][SMT][GNQ](SEQ ID NO: 708); an amino acid sequence MOTIF 17 as represented by an amino acid sequence of the formula Q[IMLV]S[EQND]LQY[ED]IWVQG[LMIV][MLIV]RD[IMLV]A (SEQ ID NO: 709); an amino acid sequence MOTIF 18 as represented by an amino acid sequence of the formula TFTLGSGVTGITSMHGEPSLDPWNGVSLDSASPTAF (SEQ ID NO: 663); an amino acid sequence MOTIF 19 as represented by an amino acid sequence of the formula [MLVI]DY[SKTR][TSKR]L[YF][REKD]DLNQIS (SEQ ID NO: 710); an amino acid sequence MOTIF 20 as represented by an amino acid sequence of the formula L[RHQKN]L[PTS]FM[QKNR]LHA[RITKLVS][VQLIN][IRLVK]E[QERNDK][NFQ][VRILK][K WSRT][SETD](SEQ ID NO: 711); an amino acid sequence MOTIF 21 as represented by an amino acid sequence of the formula V[DNQE][SAT]L[ED]QV[GST][QHN][ILV]V[GDE]AP (SEQ ID NO: 712); an amino acid sequence MOTIF 22 as represented by an amino acid sequence of the formula [IVL][EQHND][CAST][VAIL][MILV]K[IMLV][GVIL][RPK][FILV][VGIL][SLTIV]VV (SEQ ID NO: 713); an amino acid sequence MOTIF 23 as represented by an amino acid sequence of the formula TLTN[EQDN]PSE[EQDHN]F (SEQ ID NO: 714); and an amino acid sequence MOTIF 24 as represented by an amino acid sequence of the formula LP[RSKT]QS[RTKS]N[IVL]SF (SEQ ID NO: 715).

[0068] In some embodiments the nucleic acid molecule encodes a PtIP-83 polypeptide comprises an amino acid sequence MOTIF selected from: an amino acid sequence MOTIF 1 having at least 90% sequence identity to the amino acid sequence as represented by the formula MP[DE]MP[ST][ED]ADWSIFVNE[IVL]EAVAEGMPTEVSEVP[AVIL]W[KR]AKCKN[MVIL]AALGREM[SCT]I (SEQ ID NO: 693); an amino acid sequence MOTIF 2 having at least 90% sequence identity to the amino acid sequence as represented by the formula PQLQYRMYG[NS]LI[KRNQ]QMAQVAQNYD[QRNK][ED]FK[QRNK][FL][KR]LFI[IAVL]Q NQI[LFIV]GSYLL[QEND]QN[KR]AF (SEQ ID NO: 694); an amino acid sequence MOTIF 3 having at least 90% sequence identity to the amino acid sequence as represented by the formula N[TKSR]FMQMTPFT[RHK]WRLRLSASA[SPKATR]EN[AKR][EG]LAFPTATA[PLIV]DST T[EQND][IVL][VAIL]ITFHVTAIR (SEQ ID NO: 695); an amino acid sequence MOTIF 4 having at least 90% sequence identity to the amino acid sequence as represented by the formula [DNQE]FTSRHVVK[GDE]IPV[SNTQ]LLLDG[EGD]DWEFEIPVQ[AG]GMSSFP (SEQ ID NO: 696); an amino acid sequence MOTIF 5 having at least 90% sequence identity to the amino acid sequence as represented by the formula IIHQP[SAT]T[RQKN][ST]G[ITLVS][VIL]YILLQGST[IVL]FHDRRR[DE][EQDN]V[MLIV]T[F P]QAA[DAVEIL]PLN[FY][QHN]YAYRLDTG (SEQ ID NO: 697); an amino acid sequence MOTIF 6 having at least 90% sequence identity to the amino acid sequence as represented by the formula S[HQN]ADRLAAIQP[AVIL][DN]LTN[HYF]LEMAT[HQN]MDMRTT[RSKT][MILV]L[ILV]GL LN[MILV][LMIV]RIQNAAL[MRILVK]YEY (SEQ ID NO: 698); an amino acid sequence MOTIF 7 having at least 90% sequence identity to the amino acid sequence as represented by the formula [VLI]D[RQKN]VEFSEVMVIHRMYV[N]RL[SAT]DL[NDQE]V[GA][EQND]L[PED]GA[EGD][RK]VKR[VLI]YV[FLIV]ADVVE (SEQ ID NO: 699); an amino acid sequence MOTIF 8 having at least 90% sequence identity to the amino acid sequence as represented by the formula A[DE]RELQMESFH[SAT]AVISQ[RK]R[QGEND]EL[NDQE][TDSE][ATS][IFLV]AKM[DE]R[LMIV]SLQMEEE[NSDQET][RGK]AMEQA[QRNK]KEM (SEQ ID NO: 700); an amino acid sequence MOTIF 9 having at least 90% sequence identity to the amino acid sequence as represented by the formula F[VLI]TAGATAPGA[AVIL]ASAGQAV[SNTQ]IAGQAAQ[AG]LRRVVEILE[GQN]LEAVME VVAA[VIL]K (SEQ ID NO: 701); an amino acid sequence MOTIF 10 having at least 90% sequence identity to the amino acid sequence as represented by the formula D[GDE][MA][NKQK]WG[ITLVS]Y[IVL][YH][GA]E[KERD]V[EQND][RVLKI]SPL[LYFIV][P NQ][SNGTQ][NWQ][ASPT][IYLV]L[AGVIL]V[WED]A[DQNE]R[CST][TISLV]IT[SAT]A[RF MK]HN[HVTILS][VFIL][NDQE][AERDK]PG[RWK][IVL][IRLVK](SEQ ID NO: 702); an amino acid sequence MOTIF 11 having at least 90% sequence identity to the amino acid sequence as represented by the formula [KVRIL][VKRIL][CA][RGCK][PHY]PSP[DE][MILV][MVIL]SAV[AG][EVDIL]HA[LINVQ]WL[NSQT][DKER]VLL[QRNK]VVQ[KNRQ]ES[QHN][LMIV]QGT[AED][PSAT]YNECLALLGR (SEQ ID NO: 703); an amino acid sequence MOTIF 12 having at least 90% sequence identity to the amino acid sequence as represented by the formula [PNQ]T[EQDN]LT[VATILS]WPL[GRK]MDTV[AG][NDQE]LLI[ATS][QHN]E[NSQT]AAL[V LSIT]GL[ITMALVS]QLG[PQN][SPT]S (SEQ ID NO: 704); an amino acid sequence MOTIF 13 having at least 90% sequence identity to the amino acid sequence as represented by the formula [RLCKIV][DLWKEIVR][QNPRK][MTP][HQR][MILV]PGSVTVI[IVL]LCRLLQFP[ITLVS][D GE]G[SRTK][QFRNK][AST][TADES][TWS](SEQ ID NO: 705); an amino acid sequence MOTIF 14 having at least 90% sequence identity to the amino acid sequence as represented by the formula [TA][SGVTIL][ILV]PV[ED]VVTDP[SNTQ]IL[LMIV]GMQT[TS]V[LHIV]IAEL (SEQ ID NO: 706); an amino acid sequence MOTIF 15 having at least 90% sequence identity to the amino acid sequence as represented by the formula EGLR[EQND]FQN[REKD]QVA[RNKQ]A[VLI]FAVL[KSRT][AST]VA[MQN]I[AG](SEQ ID NO: 707); an amino acid sequence MOTIF 16 having at least 90% sequence identity to the amino acid sequence as represented by the formula W[TS]RVRIRHLEM[QHN]F[AVIL][QKNR]E[AST][SMT][GNQ](SEQ ID NO: 708); an amino acid sequence MOTIF 17 having at least 90% sequence identity to the amino acid sequence as represented by the formula Q[IMLV]S[EQND]LQY[ED]IWVQG[LMIV][MLIV]RD[IMLV]A (SEQ ID NO: 709); an amino acid sequence MOTIF 18 having at least 90% sequence identity to the amino acid sequence as represented by the formula TFTLGSGVTGITSMHGEPSLDPWNGVSLDSASPTAF (SEQ ID NO: 663); an amino acid sequence MOTIF 19 having at least 90% sequence identity to the amino acid sequence as represented by the formula [MLVI]DY[SKTR][TSKR]L[YF][REKD]DLNQIS (SEQ ID NO: 710); an amino acid sequence MOTIF 20 having at least 90% sequence identity to the amino acid sequence as represented by the formula L[RHQKN]L[PTS]FM[QKNR]LHA[RITKLVS][VQLIN][IRLVK]E[QERNDK][NFQ][VRILK][K WSRT][SETD](SEQ ID NO: 711); an amino acid sequence MOTIF 21 having at least 90% sequence identity to the amino acid sequence as represented by the formula V[DNQE][SAT]L[ED]QV[GST][QHN][ILV]V[GDE]AP (SEQ ID NO: 712); an amino acid sequence MOTIF 22 having at least 90% sequence identity to the amino acid sequence as represented by the formula [IVL][EQHND][CAST][VAIL][MILV]K[IMLV][GVIL][RPK][FILV][VGIL][SLTIV]VV (SEQ ID NO: 713); an amino acid sequence MOTIF 23 having at least 90% sequence identity to the amino acid sequence as represented by the formula TLTN[EQDN]PSE[EQDHN]F (SEQ ID NO: 714); and an amino acid sequence MOTIF 24 having at least 90% sequence identity to the amino acid sequence as represented by the formula LP[RSKT]QS[RTKS]N[IVL]SF (SEQ ID NO: 715).

[0069] In some embodiments the nucleic acid molecule encodes a PtIP-83 polypeptide comprising, sequentially from the N-terminus to the C-terminus, an amino acid sequence MOTIF selected from: MOTIF 19 (SEQ ID NO: 664, SEQ ID NO: 687 or SEQ ID NO: 710), MOTIF 7 (SEQ ID NO: 652, SEQ ID NO: 676 or SEQ ID NO: 699), MOTIF 13 (SEQ ID NO: 658, SEQ ID NO: 682 or SEQ ID NO: 705), MOTIF 20 (SEQ ID NO: 665, SEQ ID NO: 688 or SEQ ID NO: 711), MOTIF 10 (SEQ ID NO: 655, SEQ ID NO: 679 or SEQ ID NO: 702), MOTIF 18 (SEQ ID NO: 663), MOTIF 24 (SEQ ID NO: 669, SEQ ID NO: 692 or SEQ ID NO: 715), MOTIF 14 (SEQ ID NO: 659, SEQ ID NO: 683 or SEQ ID NO: 706), MOTIF 11 (SEQ ID NO: 656, SEQ ID NO: 680 or SEQ ID NO: 703), MOTIF 22 (SEQ ID NO: 667, SEQ ID NO: 690 or SEQ ID NO: 713), MOTIF 2 (SEQ ID NO: 647, SEQ ID NO: 671 or SEQ ID NO: 694), MOTIF 8 (SEQ ID NO: 653, SEQ ID NO: 677 or SEQ ID NO: 700), MOTIF 15 (SEQ ID NO: 660, SEQ ID NO: 684 or SEQ ID NO: 707), MOTIF 9 (SEQ ID NO: 654, SEQ ID NO: 678 or SEQ ID NO: 701), MOTIF 21 (SEQ ID NO: 666, SEQ ID NO: 689 or SEQ ID NO: 712), MOTIF 1 (SEQ ID NO: 646, SEQ ID NO: 670 or SEQ ID NO: 693), MOTIF 17 (SEQ ID NO: 662, SEQ ID NO: 686 or SEQ ID NO: 709), MOTIF 6 (SEQ ID NO: 651, SEQ ID NO: 675 or SEQ ID NO: 698), MOTIF 12 (SEQ ID NO: 657, SEQ ID NO: 681 or SEQ ID NO: 704), MOTIF 4 (SEQ ID NO: 649, SEQ ID NO: 673 or SEQ ID NO: 696), MOTIF 16 (SEQ ID NO: 661, SEQ ID NO: 685 or SEQ ID NO: 708), MOTIF 5 (SEQ ID NO: 650, SEQ ID NO: 674 or SEQ ID NO: 697), MOTIF 23 (SEQ ID NO: 668, SEQ ID NO: 691 or SEQ ID NO: 714), and MOTIF 3 (SEQ ID NO: 648, SEQ ID NO: 672 or SEQ ID NO: 695).

[0070] In some embodiments the nucleic acid molecule encodes a PtIP-83 polypeptide comprising, sequentially from the N-terminus to the C-terminus, an amino acid sequence MOTIF selected from: MOTIF 19 (SEQ ID NO: 664, SEQ ID NO: 687 or SEQ ID NO: 710), MOTIF 7 (SEQ ID NO: 652, SEQ ID NO: 676 or SEQ ID NO: 699), MOTIF 13 (SEQ ID NO: 658, SEQ ID NO: 682 or SEQ ID NO: 705), MOTIF 20 (SEQ ID NO: 665, SEQ ID NO: 688 or SEQ ID NO: 711), MOTIF 14 (SEQ ID NO: 659, SEQ ID NO: 683 or SEQ ID NO: 706), MOTIF 2 (SEQ ID NO: 647, SEQ ID NO: 671 or SEQ ID NO: 694), MOTIF 8 (SEQ ID NO: 653, SEQ ID NO: 677 or SEQ ID NO: 700), MOTIF 15 (SEQ ID NO: 660, SEQ ID NO: 684 or SEQ ID NO: 707), MOTIF 9 (SEQ ID NO: 654, SEQ ID NO: 678 or SEQ ID NO: 701), MOTIF 21 (SEQ ID NO: 666, SEQ ID NO: 689 or SEQ ID NO: 712), MOTIF 1 (SEQ ID NO: 646, SEQ ID NO: 670 or SEQ ID NO: 693), MOTIF 17 (SEQ ID NO: 662, SEQ ID NO: 686 or SEQ ID NO: 709), MOTIF 6 (SEQ ID NO: 651, SEQ ID NO: 675 or SEQ ID NO: 698), MOTIF 12 (SEQ ID NO: 657, SEQ ID NO: 681 or SEQ ID NO: 704), MOTIF 4 (SEQ ID NO: 649, SEQ ID NO: 673 or SEQ ID NO: 696), MOTIF 16 (SEQ ID NO: 661, SEQ ID NO: 685 or SEQ ID NO: 708), MOTIF 5 (SEQ ID NO: 650, SEQ ID NO: 674 or SEQ ID NO: 697), MOTIF 23 (SEQ ID NO: 668, SEQ ID NO: 691 or SEQ ID NO: 714), and MOTIF 3 (SEQ ID NO: 648, SEQ ID NO: 672 or SEQ ID NO: 695).

[0071] In some embodiments the nucleic acid molecule encodes a PtIP-83 polypeptide comprising, sequentially from the N-terminus to the C-terminus, the amino acid sequence motifs: MOTIF 19 (SEQ ID NO: 664, SEQ ID NO: 687 or SEQ ID NO: 710), MOTIF 7 (SEQ ID NO: 652, SEQ ID NO: 676 or SEQ ID NO: 699), MOTIF 13 (SEQ ID NO: 658, SEQ ID NO: 682 or SEQ ID NO: 705), MOTIF 20 (SEQ ID NO: 665, SEQ ID NO: 688 or SEQ ID NO: 711), MOTIF 10 (SEQ ID NO: 655, SEQ ID NO: 679 or SEQ ID NO: 702), MOTIF 18 (SEQ ID NO: 663), MOTIF 24 (SEQ ID NO: 669, SEQ ID NO: 692 or SEQ ID NO: 715), MOTIF 14 (SEQ ID NO: 659, SEQ ID NO: 683 or SEQ ID NO: 706), MOTIF 11 (SEQ ID NO: 656, SEQ ID NO: 680 or SEQ ID NO: 703), MOTIF 22 (SEQ ID NO: 667, SEQ ID NO: 690 or SEQ ID NO: 713), MOTIF 2 (SEQ ID NO: 647, SEQ ID NO: 671 or SEQ ID NO: 694), MOTIF 8 (SEQ ID NO: 653, SEQ ID NO: 677 or SEQ ID NO: 700), MOTIF 15 (SEQ ID NO: 660, SEQ ID NO: 684 or SEQ ID NO: 707), MOTIF 9 (SEQ ID NO: 654, SEQ ID NO: 678 or SEQ ID NO: 701), MOTIF 21 (SEQ ID NO: 666, SEQ ID NO: 689 or SEQ ID NO: 712), MOTIF 1 (SEQ ID NO: 646, SEQ ID NO: 670 or SEQ ID NO: 693), MOTIF 17 (SEQ ID NO: 662, SEQ ID NO: 686 or SEQ ID NO: 709), MOTIF 6 (SEQ ID NO: 651, SEQ ID NO: 675 or SEQ ID NO: 698), MOTIF 12 (SEQ ID NO: 657, SEQ ID NO: 681 or SEQ ID NO: 704), MOTIF 4 (SEQ ID NO: 649, SEQ ID NO: 673 or SEQ ID NO: 696), MOTIF 16 (SEQ ID NO: 661, SEQ ID NO: 685 or SEQ ID NO: 708), MOTIF 5 (SEQ ID NO: 650, SEQ ID NO: 674 or SEQ ID NO: 697), MOTIF 23 (SEQ ID NO: 668, SEQ ID NO: 691 or SEQ ID NO: 714), and MOTIF 3 (SEQ ID NO: 648, SEQ ID NO: 672 or SEQ ID NO: 695).

[0072] In some embodiments the nucleic acid molecule encodes a PtIP-83 polypeptide comprising, sequentially from the N-terminus to the C-terminus, the amino acid sequence motifs: MOTIF 19 (SEQ ID NO: 664, SEQ ID NO: 687 or SEQ ID NO: 710), MOTIF 7 (SEQ ID NO: 652, SEQ ID NO: 676 or SEQ ID NO: 699), MOTIF 13 (SEQ ID NO: 658, SEQ ID NO: 682 or SEQ ID NO: 705), MOTIF 20 (SEQ ID NO: 665, SEQ ID NO: 688 or SEQ ID NO: 711), MOTIF 14 (SEQ ID NO: 659, SEQ ID NO: 683 or SEQ ID NO: 706), MOTIF 2 (SEQ ID NO: 647, SEQ ID NO: 671 or SEQ ID NO: 694), MOTIF 8 (SEQ ID NO: 653, SEQ ID NO: 677 or SEQ ID NO: 700), MOTIF 15 (SEQ ID NO: 660, SEQ ID NO: 684 or SEQ ID NO: 707), MOTIF 9 (SEQ ID NO: 654, SEQ ID NO: 678 or SEQ ID NO: 701), MOTIF 21 (SEQ ID NO: 666, SEQ ID NO: 689 or SEQ ID NO: 712), MOTIF 1 (SEQ ID NO: 646, SEQ ID NO: 670 or SEQ ID NO: 693), MOTIF 17 (SEQ ID NO: 662, SEQ ID NO: 686 or SEQ ID NO: 709), MOTIF 6 (SEQ ID NO: 651, SEQ ID NO: 675 or SEQ ID NO: 698), MOTIF 12 (SEQ ID NO: 657, SEQ ID NO: 681 or SEQ ID NO: 704), MOTIF 4 (SEQ ID NO: 649, SEQ ID NO: 673 or SEQ ID NO: 696), MOTIF 16 (SEQ ID NO: 661, SEQ ID NO: 685 or SEQ ID NO: 708), MOTIF 5 (SEQ ID NO: 650, SEQ ID NO: 674 or SEQ ID NO: 697), MOTIF 23 (SEQ ID NO: 668, SEQ ID NO: 691 or SEQ ID NO: 714), and MOTIF 3 (SEQ ID NO: 648, SEQ ID NO: 672 or SEQ ID NO: 695).

[0073] In some embodiments the nucleic acid molecule encodes a PtIP-83 polypeptide comprising sequentially from the N-terminus to the C-terminus: a Region A of between about 200 to about 300 amino acids in length comprising an amino acid sequence MOTIF of: MOTIF 19 (SEQ ID NO: 664, SEQ ID NO: 687 or SEQ ID NO: 710), MOTIF 7 (SEQ ID NO: 652, SEQ ID NO: 676 or SEQ ID NO: 699), MOTIF 13 (SEQ ID NO: 658, SEQ ID NO: 682 or SEQ ID NO: 705), MOTIF 20 (SEQ ID NO: 665, SEQ ID NO: 688 or SEQ ID NO: 711), MOTIF 10 (SEQ ID NO: 655, SEQ ID NO: 679 or SEQ ID NO: 702), MOTIF 18 (SEQ ID NO: 663), MOTIF 24 (SEQ ID NO: 669, SEQ ID NO: 692 or SEQ ID NO: 715), and/or MOTIF 14 having a predominantly nonconserved secondary structure; a Region B of between about 380 to about 465 amino acids in length comprising an amino acid sequence MOTIF of MOTIF 22 (SEQ ID NO: 667, SEQ ID NO: 690 or SEQ ID NO: 713), MOTIF 2 (SEQ ID NO: 647, SEQ ID NO: 671 or SEQ ID NO: 694), MOTIF 8 (SEQ ID NO: 653, SEQ ID NO: 677 or SEQ ID NO: 700), MOTIF 15 (SEQ ID NO: 660, SEQ ID NO: 684 or SEQ ID NO: 707), MOTIF 9 (SEQ ID NO: 654, SEQ ID NO: 678 or SEQ ID NO: 701), MOTIF 21 (SEQ ID NO: 666, SEQ ID NO: 689 or SEQ ID NO: 712), MOTIF 1 (SEQ ID NO: 646, SEQ ID NO: 670 or SEQ ID NO: 693), MOTIF 17 (SEQ ID NO: 662, SEQ ID NO: 686 or SEQ ID NO: 709), MOTIF 6 (SEQ ID NO: 651, SEQ ID NO: 675 or SEQ ID NO: 698), and/or MOTIF 12 and having a predominately alpha helical structure; and a Region C of between about 150 to about 180 amino acids in length comprising an amino acid sequence MOTIF of MOTIF 16 (SEQ ID NO: 661, SEQ ID NO: 685 or SEQ ID NO: 708), MOTIF 5 (SEQ ID NO: 650, SEQ ID NO: 674 or SEQ ID NO: 697), MOTIF 23 (SEQ ID NO: 668, SEQ ID NO: 691 or SEQ ID NO: 714), and/or MOTIF 3 (SEQ ID NO: 648, SEQ ID NO: 672 or SEQ ID NO: 695), having a consensus secondary structure comprising predominately beta strand structure.

[0074] In some embodiments the PtIP-83 polypeptide comprises an amino acid sequence MOTIF at the positions as shown in Table 2.

[0075] In some embodiments the nucleic acid molecule encodes a PtIP-83 polypeptide comprising sequentially from the N-terminus to the C-terminus: a Region A of between about 200 to about 300 amino acids in length having a predominantly nonconserved secondary structure; a Region B of between about 380 to about 465 amino acids in length having a consensus secondary structure comprising 8 to 10 segments of predominately alpha helical structure; and a Region C of between about 150 to about 180 amino acids in length having a consensus secondary structure comprising 6 to 8 segments of predominately beta strand structure. As used herein “predominantly nonconserved secondary structure” means that the regions of secondary structure don't consistently align within the family of PtIP polypeptides. As used herein “predominately alpha helical structure” means that secondary structure prediction may have one or more gap of between 1 to 6 amino acids of coil and/or beta strand structure intervening in the alpha helix structure. As used herein “predominately beta strand structure” means that secondary structure prediction may have one or more gap of between 1 to 6 amino acids of coil and/or alpha helix structure intervening in the beta strand structure. In some embodiments the secondary structure is generated by the PSIPRED, top ranked secondary structure prediction method (Jones D T. (1999) J. Mol. Biol. 292: 195-202).

[0076] In some embodiments the nucleic acid molecule encodes a PtIP-83 polypeptide comprising sequentially from the N-terminus to the C-terminus: a Region A of between about 200 to about 300 amino acids in length having a predominantly nonconserved secondary structure; a Region B of between about 380 to about 465 amino acids in length having a consensus secondary structure comprising nine segments of predominately alpha helical structure; and a Region C of between about 150 to about 180 amino acids in length having a consensus secondary structure comprising seven segments of predominately beta strand structure.

[0077] In some embodiments the nucleic acid molecule encodes a PtIP-83 polypeptide comprising sequentially from the N-terminus to the C-terminus: a Region A of between about 200 to about 300 amino acids in length having a predominantly nonconserved secondary structure, wherein the Region A comprises a conserved beta strand 1 (β1a) of between about 4 and about 12 amino acids in length within about amino acid residue 30 to about amino acid residue 130 from the N-terminus of the PtIP-83 polypeptide; a Region B of between about 380 to about 465 amino acids in length having a consensus secondary structure comprising nine segments of predominately alpha helical structure; and a Region C of between about 150 to about 180 amino acids in length having a consensus secondary structure comprising seven segments of predominately beta strand structure.

[0078] In some embodiments the nucleic acid molecule encodes a PtIP-83 polypeptide comprising sequentially from the N-terminus to the C-terminus: a Region A of between about 200 to about 300 amino acids in length having a flexible consensus secondary structure, wherein the Region A comprises a conserved beta strand 1 (β1a) of between about 4 and about 12 amino acids in length, a coil of between about 3 and and about 18 amino acids in length and a beta strand 2 (β1b) of between about 4 and about 32 amino acids in length, within about amino acid residue 50 to about amino acid residue 165 from the N-terminus of the PtIP-83 polypeptide; a Region B of between about 380 to about 465 amino acids in length having a consensus secondary structure comprising nine segments of predominately alpha helical structure; and a Region C of between about 150 to about 180 amino acids in length having a consensus secondary structure comprising seven segments of predominately beta strand structure.

[0079] In some embodiments the nucleic acid molecule encodes a PtIP-83 polypeptide comprising sequentially from the N-terminus to the C-terminus: a Region A of between about 200 to about 300 amino acids in length having a predominantly nonconserved secondary structure; a Region B of between about 380 to about 465 amino acids in length having a consensus secondary structure comprising sequentially: i) an alpha helix-1 of between about 10 and about 26 amino acids in length; ii) a coil-1 of between about 2 and about 8 amino acids in length flanked by alpha helix-1 and alpha helix-2; iii) an alpha helix-2 of between about 15 and about 24 amino acids in length; iv) a coil-2 of between about 4 and about 14 amino acids in length flanked by alpha helix-2 and alpha helix-3; v) an alpha helix 3 of between about 15 and about 27 amino acids in length; vi) a coil-3 of between about 11 and about 13 amino acids in length flanked by alpha helix-3 and alpha helix-4; vii) an alpha helix-4 of about 24 180 amino acids in length; viii) a coil-4 of between about 4 and about 5 amino acids in length flanked by alpha helix-4 and alpha helix-5; ix) an alpha helix-5 of between about 50 and about 54 amino acids in length; x) a coil-5 of between about 11 and about 17 amino acids in length flanked by alpha helix-5 and alpha helix-6; xi) an alpha helix-6 of between about 15 and about 16 amino acids in length; xii) a coil-6 of between about 6 and about 9 amino acids in length flanked by alpha helix-6 and alpha helix-7; xiii) an alpha helix-7 of between about 49 and about 55 amino acids in length; xiv) a coil-7 of between about 3 and about 8 amino acids in length flanked by alpha helix-7 and alpha helix-8; xv) an alpha helix-8 of between about 33 and about 36 amino acids in length; xvi) a coil-8 of between about 14 and about 16 amino acids in length flanked by alpha helix-8 and alpha helix-9; xvii) an alpha helix-9 of between about 16 and about 23 amino acids in length; xviii) a coil-9 of between about 21 and about 28 amino acids in length flanked by alpha helix-9 and Region C; and a Region C of between about 150 to about 180 amino acids in length having a consensus secondary structure comprising seven segments of predominately beta strand structure.

[0080] In some embodiments the nucleic acid molecule encodes a PtIP-83 polypeptide comprising sequentially from the N-terminus to the C-terminus: a Region A of between about 200 to about 300 amino acids in length having a predominantly nonconserved secondary structure; a Region B of between about 380 to about 465 amino acids in length having a consensus secondary structure comprising nine segments of predominately alpha helical structure; and a Region C of between about 150 to about 180 amino acids in length having a consensus secondary structure comprising sequentially: i) a beta strand-1 (β1) of between about 3 amino acids and about 5 amino acids in length; ii) a coil of between about 13 amino acids and about 17 amino acids in length; iii) a beta strand-2 (β2) of between about 7 amino acids and about 11 amino acids in length; iv) a coil of between about 17 amino acids and about 23 amino acids in length; v) a beta strand-3 (β3) of between about 5 amino acids and about 7 amino acids in length; vi) a coil of between about 12 amino acids and about 14 amino acids in length; vii) a beta strand-4 (β4) of between about 5 amino acids and about 6 amino acids in length; viii) a coil of between about 2 amino acids and about 7 amino acids in length; ix) a beta strand-5 (β5) of between about 5 amino acids and about 7 amino acids in length; x) a coil of between about 26 amino acids and about 28 amino acids in length; xi) a beta strand-6 (β6) of between about 5 amino acids and about 7 amino acids in length; xii) a coil of between about 16 amino acids and about 20 amino acids in length; and xiii) a beta strand-1 (β7) of between about 13 amino acids and about 17 amino acids in length.

[0081] In some embodiments the nucleic acid molecule encodes a PtIP-83 polypeptide comprising sequentially from the N-terminus to the C-terminus: a Region A of between about 200 to about 300 amino acids in length having a predominantly nonconserved secondary structure; a Region B of between about 380 to about 465 amino acids in length having a consensus secondary structure comprising sequentially: i) an alpha helix-1 of between about 10 and about 26 amino acids in length; ii) a coil-1 of between about 2 and about 8 amino acids in length flanked by alpha helix-1 and alpha helix-2; iii) an alpha helix-2 of between about 15 and about 24 amino acids in length; iv) a coil-2 of between about 4 and about 14 amino acids in length flanked by alpha helix-2 and alpha helix-3; v) an alpha helix 3 of between about 15 and about 27 amino acids in length; vi) a coil-3 of between about 11 and about 13 amino acids in length flanked by alpha helix-3 and alpha helix-4; vii) an alpha helix-4 of about 24 180 amino acids in length; viii) a coil-4 of between about 4 and about 5 amino acids in length flanked by alpha helix-4 and alpha helix-5; ix) an alpha helix-5 of between about 50 and about 54 amino acids in length; x) a coil-5 of between about 11 and about 17 amino acids in length flanked by alpha helix-5 and alpha helix-6; xi) an alpha helix-6 of between about 15 and about 16 amino acids in length; xii) a coil-6 of between about 6 and about 9 amino acids in length flanked by alpha helix-6 and alpha helix-7; xiii) an alpha helix-7 of between about 49 and about 55 amino acids in length; xiv) a coil-7 of between about 3 and about 8 amino acids in length flanked by alpha helix-7 and alpha helix-8; xv) an alpha helix-8 of between about 33 and about 36 amino acids in length; xvi) a coil-8 of between about 14 and about 16 amino acids in length flanked by alpha helix-8 and alpha helix-9; xvii) an alpha helix-9 of between about 16 and about 23 amino acids in length; xviii) a coil-9 of between about 21 and about 28 amino acids in length flanked by alpha helix-9 and Region C; and a Region C of between about 150 to about 180 amino acids in length having a consensus secondary structure comprising sequentially: i) a beta strand-1 (β1) of between about 3 amino acids and about 5 amino acids in length; ii) a coil of between about 13 amino acids and about 17 amino acids in length; iii) a beta strand-2 (β2) of between about 7 amino acids and about 11 amino acids in length; iv) a coil of between about 17 amino acids and about 23 amino acids in length; v) a beta strand-3 (β3) of between about 5 amino acids and about 7 amino acids in length; vi) a coil of between about 12 amino acids and about 14 amino acids in length; vii) a beta strand-4 (β4) of between about 5 amino acids and about 6 amino acids in length; viii) a coil of between about 2 amino acids and about 7 amino acids in length; ix) a beta strand-5 (β5) of between about 5 amino acids and about 7 amino acids in length; x) a coil of between about 26 amino acids and about 28 amino acids in length; xi) a beta strand-6 (β6) of between about 5 amino acids and about 7 amino acids in length; xii) a coil of between about 16 amino acids and about 20 amino acids in length; and xiii) a beta strand-1 (β7) of between about 13 amino acids and about 17 amino acids in length.

[0082] In some embodiments the nucleic acid molecule encodes a PtIP-83 polypeptide comprising sequentially from the N-terminus to the C-terminus: a Region A of between about 200 to about 300 amino acids in length having a flexible consensus secondary structure, wherein the Region A comprises a conserved beta strand 1 (β1a) of between about 4 and about 12 amino acids in length within about amino acid residue 30 to about amino acid residue 130 from the N-terminus of the PtIP-83 polypeptide; a Region B of between about 380 to about 465 amino acids in length having a consensus secondary structure comprising sequentially: i) an alpha helix-1 of between about 10 and about 26 amino acids in length; ii) a coil-1 of between about 2 and about 8 amino acids in length flanked by alpha helix-1 and alpha helix-2; iii) an alpha helix-2 of between about 15 and about 24 amino acids in length; iv) a coil-2 of between about 4 and about 14 amino acids in length flanked by alpha helix-2 and alpha helix-3; v) an alpha helix 3 of between about 15 and about 27 amino acids in length; vi) a coil-3 of between about 11 and about 13 amino acids in length flanked by alpha helix-3 and alpha helix-4; vii) an alpha helix-4 of about 24 180 amino acids in length; viii) a coil-4 of between about 4 and about 5 amino acids in length flanked by alpha helix-4 and alpha helix-5; ix) an alpha helix-5 of between about 50 and about 54 amino acids in length; x) a coil-5 of between about 11 and about 17 amino acids in length flanked by alpha helix-5 and alpha helix-6; xi) an alpha helix-6 of between about 15 and about 16 amino acids in length; xii) a coil-6 of between about 6 and about 9 amino acids in length flanked by alpha helix-6 and alpha helix-7; xiii) an alpha helix-7 of between about 49 and about 55 amino acids in length; xiv) a coil-7 of between about 3 and about 8 amino acids in length flanked by alpha helix-7 and alpha helix-8; xv) an alpha helix-8 of between about 33 and about 36 amino acids in length; xvi) a coil-8 of between about 14 and about 16 amino acids in length flanked by alpha helix-8 and alpha helix-9; xvii) an alpha helix-9 of between about 16 and about 23 amino acids in length; xviii) a coil-9 of between about 21 and about 28 amino acids in length flanked by alpha helix-9 and Region C; and a Region C of between about 150 to about 180 amino acids in length having a consensus secondary comprising sequentially: i) a beta strand-1 (β1) of between about 3 amino acids and about 5 amino acids in length; ii) a coil of between about 13 amino acids and about 17 amino acids in length; iii) a beta strand-2 (β2) of between about 7 amino acids and about 11 amino acids in length; iv) a coil of between about 17 amino acids and about 23 amino acids in length; v) a beta strand-3 (β3) of between about 5 amino acids and about 7 amino acids in length; vi) a coil of between about 12 amino acids and about 14 amino acids in length; vii) a beta strand-4 (β4) of between about 5 amino acids and about 6 amino acids in length; viii) a coil of between about 2 amino acids and about 7 amino acids in length; ix) a beta strand-5 (β5) of between about 5 amino acids and about 7 amino acids in length; x) a coil of between about 26 amino acids and about 28 amino acids in length; xi) a beta strand-6 (β6) of between about 5 amino acids and about 7 amino acids in length; xii) a coil of between about 16 amino acids and about 20 amino acids in length; and xiii) a beta strand-1 (β7) of between about 13 amino acids and about 17 amino acids in length.

[0083] Also provided are nucleic acid molecules that encode transcription and/or translation products that are subsequently spliced to ultimately produce functional PtIP-83 polypeptides. Splicing can be accomplished in vitro or in vivo, and can involve cis- or trans-splicing. The substrate for splicing can be polynucleotides (e.g., RNA transcripts) or polypeptides. An example of cis-splicing of a polynucleotide is where an intron inserted into a coding sequence is removed and the two flanking exon regions are spliced to generate a PtIP-83 polypeptide encoding sequence. An example of trans splicing would be where a polynucleotide is encrypted by separating the coding sequence into two or more fragments that can be separately transcribed and then spliced to form the full-length pesticidal encoding sequence. The use of a splicing enhancer sequence, which can be introduced into a construct, can facilitate splicing either in cis or trans-splicing of polypeptides (U.S. Pat. Nos. 6,365,377 and 6,531,316). Thus, in some embodiments the polynucleotides do not directly encode a full-length PtIP-83 polypeptide, but rather encode a fragment or fragments of a PtIP-83 polypeptide. These polynucleotides can be used to express a functional PtIP-83 polypeptide through a mechanism involving splicing, where splicing can occur at the level of polynucleotide (e.g., intron/exon) and/or polypeptide (e.g., intein/extein). This can be useful, for example, in controlling expression of pesticidal activity, since a functional pesticidal polypeptide will only be expressed if all required fragments are expressed in an environment that permits splicing processes to generate functional product. In another example, introduction of one or more insertion sequences into a polynucleotide can facilitate recombination with a low homology polynucleotide; use of an intron or intein for the insertion sequence facilitates the removal of the intervening sequence, thereby restoring function of the encoded variant.

[0084] Nucleic acid molecules that are fragments of these nucleic acid sequences encoding PtIP-83 polypeptides are also encompassed by the embodiments. “Fragment” as used herein refers to a portion of the nucleic acid sequence encoding a PtIP-83 polypeptide. A fragment of a nucleic acid sequence may encode a biologically active portion of a PtIP-83 polypeptide or it may be a fragment that can be used as a hybridization probe or PCR primer using methods disclosed below. Nucleic acid molecules that are fragments of a nucleic acid sequence encoding a PtIP-83 polypeptide comprise at least about 150, 180, 210, 240, 270, 300, 330 or 360, contiguous nucleotides or up to the number of nucleotides present in a full-length nucleic acid sequence encoding a PtIP-83 polypeptide disclosed herein, depending upon the intended use. “Contiguous nucleotides” is used herein to refer to nucleotide residues that are immediately adjacent to one another. Fragments of the nucleic acid sequences of the embodiments will encode protein fragments that retain the biological activity of the PtIP-83 polypeptide and, hence, retain insecticidal activity. “Retains insecticidal activity” is used herein to refer to a polypeptide having at least about 10%, at least about 30%, at least about 50%, at least about 70%, 80%, 90%, 95% or higher of the insecticidal activity of the full-length PtIP-83Aa polypeptide (SEQ ID NO: 1). In some embodiments, the insecticidal activity is Lepidoptera activity. In one embodiment, the insecticidal activity is against a Coleopteran species. In some embodiments, the insecticidal activity is against one or more insect pests of the corn rootworm complex: western corn rootworm, Diabrotica virgifera; northern corn rootworm, D. barberi: Southern corn rootworm or spotted cucumber beetle; Diabrotica undecimpunctata howardi, and the Mexican corn rootworm, D. virgifera zeae. In one embodiment, the insecticidal activity is against a Diabrotica species.

[0085] In some embodiments a fragment of a nucleic acid sequence encoding a PtIP-83 polypeptide encoding a biologically active portion of a protein will encode at least about 15, 20, 30, 50, 75, 100, 125, contiguous amino acids or up to the total number of amino acids present in a full-length PtIP-83 polypeptide of the embodiments. In some embodiments, the fragment is an N-terminal and/or a C-terminal truncation of at least about 1, 2, 3, 4, 5, 6, 7, 8, 9, 10, 11, 12, 13, 14, 15, 16, 17, 18, 19, 20, 21, 22, 23, 24, 25, 26, 27, 28, 29, 30, 31, 32, 33, 34 or more amino acids from the N-terminus and/or C-terminus relative to SEQ ID NO: 1, SEQ ID NO: 3, SEQ ID NO: 5, SEQ ID NO: 7, SEQ ID NO: 9, SEQ ID NO: 11, SEQ ID NO: 13, SEQ ID NO: 15, SEQ ID NO: 17, SEQ ID NO: 19, SEQ ID NO: 21, SEQ ID NO: 23 or SEQ ID NO: 716, SEQ ID NO: 754, SEQ ID NO: 755, SEQ ID NO: 756, SEQ ID NO: 757, SEQ ID NO: 758, SEQ ID NO: 759, SEQ ID NO: 760, SEQ ID NO: 761, SEQ ID NO: 762, SEQ ID NO: 763, SEQ ID NO: 764, SEQ ID NO: 765, SEQ ID NO: 766, SEQ ID NO: 767, SEQ ID NO: 768 or SEQ ID NO: 769 variants thereof, e.g., by proteolysis, insertion of a start codon, deletion of the codons encoding the deleted amino acids with the concomitant insertion of a stop codon or by insertion of a stop codon in the coding sequence. In some embodiments, the fragments encompassed herein result from the removal of the N-terminal 1, 2, 3, 4, 5, 6, 7, 8, 9, 10, 11, 12, 13, 14, 15, 16, 17, 18, 19, 20, 21, 22, 23, 24, 25 or more amino acids from the N-terminus relative to SEQ ID NO: 1, SEQ ID NO: 3, SEQ ID NO: 5, SEQ ID NO: 7, SEQ ID NO: 9, SEQ ID NO: 11, SEQ ID NO: 13, SEQ ID NO: 15, SEQ ID NO: 17, SEQ ID NO: 19, SEQ ID NO: 21, SEQ ID NO: 23, SEQ ID NO: 716, SEQ ID NO: 754, SEQ ID NO: 755, SEQ ID NO: 756, SEQ ID NO: 757, SEQ ID NO: 758, SEQ ID NO: 759, SEQ ID NO: 760, SEQ ID NO: 761, SEQ ID NO: 762, SEQ ID NO: 763, SEQ ID NO: 764, SEQ ID NO: 765, SEQ ID NO: 766, SEQ ID NO: 767, SEQ ID NO: 768, SEQ ID NO: 769 or variants thereof, e.g., by proteolysis or by insertion of a start codon in the coding sequence. In some embodiments, the fragments encompassed herein result from the removal of the N-terminal 1, 2, 3, 4, 5, 6, 7, 8, 9, 10, 11, 12, 13, 14 amino acids relative to SEQ ID NO: 1, SEQ ID NO: 3, SEQ ID NO: 5, SEQ ID NO: 7, SEQ ID NO: 9, SEQ ID NO: 11, SEQ ID NO: 13, SEQ ID NO: 15, SEQ ID NO: 17, SEQ ID NO: 19, SEQ ID NO: 21, SEQ ID NO: 23, SEQ ID NO: 716, SEQ ID NO: 754, SEQ ID NO: 755, SEQ ID NO: 756, SEQ ID NO: 757, SEQ ID NO: 758, SEQ ID NO: 759, SEQ ID NO: 760, SEQ ID NO: 761, SEQ ID NO: 762, SEQ ID NO: 763, SEQ ID NO: 764, SEQ ID NO: 765, SEQ ID NO: 766, SEQ ID NO: 767, SEQ ID NO: 768, SEQ ID NO: 769 or variants thereof, e.g., by proteolysis or by insertion of a start codon in the coding sequence.

[0086] In some embodiments the PtIP-83 polypeptide is encoded by a nucleic acid sequence sufficiently homologous to the nucleic acid sequence of SEQ ID NO: 2, SEQ ID NO: 4, SEQ ID NO: 6, SEQ ID NO: 8, SEQ ID NO: 10, SEQ ID NO: 12, SEQ ID NO: 14, SEQ ID NO: 16, SEQ ID NO: 18, SEQ ID NO: 20, SEQ ID NO: 22, SEQ ID NO: 24, SEQ ID NO: 717, SEQ ID NO: 738, SEQ ID NO: 739, SEQ ID NO: 740, SEQ ID NO: 741, SEQ ID NO: 742, SEQ ID NO: 743, SEQ ID NO: 744, SEQ ID NO: 745, SEQ ID NO: 746, SEQ ID NO: 747, SEQ ID NO: 748, SEQ ID NO: 749, SEQ ID NO: 750, SEQ ID NO: 751, SEQ ID NO: 752 or SEQ ID NO: 753. “Sufficiently homologous” is used herein to refer to an amino acid or nucleic acid sequence that has at least about 50%, 55%, 60%, 65%, 70%, 75%, 80%, 81%, 82%, 83%, 84%, 85%, 86%, 87%, 88%, 89%, 90%, 91%, 92%, 93%, 94%, 95%, 96%, 97%, 98%, 99% or greater sequence homology compared to a reference sequence using one of the alignment programs described herein using standard parameters. One of skill in the art will recognize that these values can be appropriately adjusted to determine corresponding homology of proteins encoded by two nucleic acid sequences by taking into account codon degeneracy, amino acid similarity, reading frame positioning, and the like.

[0087] In some embodiments the sequence homology is against the full length sequence of the polynucleotide encoding a PtIP-83 polypeptide or against the full length sequence of a PtIP-83 polypeptide.

[0088] In some embodiments the nucleic acid encoding a PtIP-83 polypeptide is selected from SEQ ID NO: 2, SEQ ID NO: 4, SEQ ID NO: 6, SEQ ID NO: 8, SEQ ID NO: 10, SEQ ID NO: 12, SEQ ID NO: 14, SEQ ID NO: 16, SEQ ID NO: 18, SEQ ID NO: 20, SEQ ID NO: 22, SEQ ID NO: 24, SEQ ID NO: 28, SEQ ID NO: 29, any one of SEQ ID NO: 172-235, any one of SEQ ID NO: 300-333, any one of SEQ ID NO: 368-397, any one of SEQ ID NO: 428-517, SEQ ID NO: 717, any one of SEQ ID NO: 718-727, and any one of SEQ ID NO: 738-753.

[0089] In some embodiments the nucleic acid encodes a PtIP-83 polypeptide having at least about 50%, 55%, 60%, 65%, 70%, 75%, 80%, 81%, 82%, 83%, 84%, 85%, 86%, 87%, 88%, 89%, 90%, 91%, 92%, 93%, 94%, 95%, 96%, 97%, 98%, 99% or greater sequence identity compared to SEQ ID NO: 1, SEQ ID NO: 3, SEQ ID NO: 5, SEQ ID NO: 7, SEQ ID NO: 9, SEQ ID NO: 11, SEQ ID NO: 13, SEQ ID NO: 15, SEQ ID NO: 17, SEQ ID NO: 19, SEQ ID NO: 21, SEQ ID NO: 23, SEQ ID NO: 716, SEQ ID NO: 754, SEQ ID NO: 755, SEQ ID NO: 756, SEQ ID NO: 757, SEQ ID NO: 758, SEQ ID NO: 759, SEQ ID NO: 760, SEQ ID NO: 761, SEQ ID NO: 762, SEQ ID NO: 763, SEQ ID NO: 764, SEQ ID NO: 765, SEQ ID NO: 766, SEQ ID NO: 767, SEQ ID NO: 768 or SEQ ID NO: 769. In some embodiments the sequence identity is calculated using ClustalW algorithm in the ALIGNX® module of the Vector NTI® Program Suite (Invitrogen Corporation, Carlsbad, Calif.) with all default parameters. In some embodiments the sequence identity is across the entire length of polypeptide calculated using ClustalW algorithm in the ALIGNX module of the Vector NTI Program Suite (Invitrogen Corporation, Carlsbad, Calif.) with all default parameters.

[0090] To determine the percent identity of two amino acid sequences or of two nucleic acid sequences, the sequences are aligned for optimal comparison purposes. The percent identity between the two sequences is a function of the number of identical positions shared by the sequences (i.e., percent identity=number of identical positions/total number of positions (e.g., overlapping positions)×100). In one embodiment, the two sequences are the same length. In another embodiment, the comparison is across the entirety of the reference sequence (e.g., across the entirety of SEQ ID NO: 1). The percent identity between two sequences can be determined using techniques similar to those described below, with or without allowing gaps. In calculating percent identity, typically exact matches are counted.

[0091] The determination of percent identity between two sequences can be accomplished using a mathematical algorithm. A non-limiting example of a mathematical algorithm utilized for the comparison of two sequences is the algorithm of Karlin and Altschul, (1990) Proc. Natl. Acad. Sci. USA 87:2264, modified as in Karlin and Altschul, (1993) Proc. Natl. Acad. Sci. USA 90:5873-5877. Such an algorithm is incorporated into the BLASTN and BLASTX programs of Altschul, et al., (1990) J. Mol. Biol. 215:403. BLAST nucleotide searches can be performed with the BLASTN program, score=100, wordlength=12, to obtain nucleic acid sequences homologous to pesticidal nucleic acid molecules of the embodiments. BLAST protein searches can be performed with the BLASTX program, score=50, wordlength=3, to obtain amino acid sequences homologous to pesticidal protein molecules of the embodiments. To obtain gapped alignments for comparison purposes, Gapped BLAST (in BLAST 2.0) can be utilized as described in Altschul, et al., (1997) Nucleic Acids Res. 25:3389. Alternatively, PSI-Blast can be used to perform an iterated search that detects distant relationships between molecules. See, Altschul, et al., (1997) supra. When utilizing BLAST, Gapped BLAST, and PSI-Blast programs, the default parameters of the respective programs (e.g., BLASTX and BLASTN) can be used. Alignment may also be performed manually by inspection.

[0092] Another non-limiting example of a mathematical algorithm utilized for the comparison of sequences is the ClustalW algorithm (Higgins, et al., (1994) Nucleic Acids Res. 22:4673-4680). ClustalW compares sequences and aligns the entirety of the amino acid or DNA sequence, and thus can provide data about the sequence conservation of the entire amino acid sequence. The ClustalW algorithm is used in several commercially available DNA/amino acid analysis software packages, such as the ALIGNX® module of the Vector NTI® Program Suite (Invitrogen Corporation, Carlsbad, Calif.). After alignment of amino acid sequences with ClustalW, the percent amino acid identity can be assessed. A non-limiting example of a software program useful for analysis of ClustalW alignments is GENEDOC™. GENEDOC™ (Karl Nicholas) allows assessment of amino acid (or DNA) similarity and identity between multiple proteins. Another non-limiting example of a mathematical algorithm utilized for the comparison of sequences is the algorithm of Myers and Miller, (1988) CABIOS 4:11-17. Such an algorithm is incorporated into the ALIGN program (version 2.0), which is part of the GCG Wisconsin Genetics Software Package, Version 10 (available from Accelrys, Inc., 9685 Scranton Rd., San Diego, Calif., USA). When utilizing the ALIGN program for comparing amino acid sequences, a PAM120 weight residue table, a gap length penalty of 12, and a gap penalty of 4 can be used.

[0093] Another non-limiting example of a mathematical algorithm utilized for the comparison of sequences is the algorithm of Needleman and Wunsch, (1970) J. Mol. Biol. 48(3):443-453, used GAP Version 10 software to determine sequence identity or similarity using the following default parameters: % identity and % similarity for a nucleic acid sequence using GAP Weight of 50 and Length Weight of 3, and the nwsgapdna.cmpii scoring matrix; % identity or % similarity for an amino acid sequence using GAP weight of 8 and length weight of 2, and the BLOSUM62 scoring program. Equivalent programs may also be used. “Equivalent program” is used herein to refer to any sequence comparison program that, for any two sequences in question, generates an alignment having identical nucleotide residue matches and an identical percent sequence identity when compared to the corresponding alignment generated by GAP Version 10.

[0094] The embodiments also encompass nucleic acid molecules encoding PtIP-83 polypeptide variants. “Variants” of the PtIP-83 polypeptide encoding nucleic acid sequences include those sequences that encode the PtIP-83 polypeptides disclosed herein but that differ conservatively because of the degeneracy of the genetic code as well as those that are sufficiently identical as discussed above. Naturally occurring allelic variants can be identified with the use of well-known molecular biology techniques, such as polymerase chain reaction (PCR) and hybridization techniques as outlined below. Variant nucleic acid sequences also include synthetically derived nucleic acid sequences that have been generated, for example, by using site-directed mutagenesis but which still encode the PtIP-83 polypeptides disclosed as discussed below.

[0095] The present disclosure provides isolated or recombinant polynucleotides that encode any of the PtIP-83 polypeptides disclosed herein. Those having ordinary skill in the art will readily appreciate that due to the degeneracy of the genetic code, a multitude of nucleotide sequences encoding PtIP-83 polypeptides of the present disclosure exist. Table 1 is a codon table that provides the synonymous codons for each amino acid. For example, the codons AGA, AGG, CGA, CGC, CGG, and CGU all encode the amino acid arginine. Thus, at every position in the nucleic acids of the disclosure where an arginine is specified by a codon, the codon can be altered to any of the corresponding codons described above without altering the encoded polypeptide. It is understood that U in an RNA sequence corresponds to T in a DNA sequence.

TABLE 1

| | | | | | | | | |
|---|---|---|---|---|---|---|---|---|
| Alanine | Ala | A | GCA | GCC | GCG | GC | | |
| Cystine | Cys | | UGC | UGU | | | | |
| Aspartic acid | Asp | D | GAC | GAU | | | | |
| Glutamic acid | Glu | E | GAA | GAG | | | | |
| Phenylalanine | Phe | F | UUC | UUU | | | | |
| Glycine | Gly | G | GGA | GGC | GGG | GGU | | |
| Histidine | His | | CAC | CAU | | | | |
| Isoleucine | Il | I | AUA | AUC | AUU | | | |
| Lysine | Lys | K | AAA | AAG | | | | |
| Leucine | Leu | L | UUA | UUG | CUA | CUC | CUG | C U |
| Methionine | Me | M | AUG | | | | | |
| Asparagine | Asn | N | AAC | AAU | | | | |
| Proline | Pro | P | CCA | CCC | CCG | CCU | | |
| Glutamine | Gln | Q | CAA | CAG | | | | |
| Arginine | Arg | R | AGA | AGG | CGA | CGC | CGG | CGU |
| Serine | Ser | S | AGC | AGU | UCA | UCC | UCG | UCC |
| Threonine | Thr | T | ACA | ACC | ACG | ACU | | |
| Valine | Val | V | GUA | GUC | GUG | GUU | | |
| Tryptophan | Trp | W | TGG | | | | | |
| Tyrosine | Tyr | Y | UAC | UAU | | | | |

[0096] The skilled artisan will further appreciate that changes can be introduced by mutation of the nucleic acid sequences thereby leading to changes in the amino acid sequence of the encoded PtIP-83 polypeptides, without altering the biological activity of the proteins. Thus, variant nucleic acid molecules can be created by introducing one or more nucleotide substitutions, additions and/or deletions into the corresponding nucleic acid sequence disclosed herein, such that one or more amino acid substitutions, additions or deletions are introduced into the encoded protein. Mutations can be introduced by standard techniques, such as site-directed mutagenesis and PCR-mediated mutagenesis. Such variant nucleic acid sequences are also encompassed by the present disclosure.

[0097] Alternatively, variant nucleic acid sequences can be made by introducing mutations randomly along all or part of the coding sequence, such as by saturation mutagenesis, and the resultant mutants can be screened for ability to confer pesticidal activity to identify mutants that retain activity. Following mutagenesis, the encoded protein can be expressed recombinantly, and the activity of the protein can be determined using standard assay techniques.

[0098] The polynucleotides of the disclosure and fragments thereof are optionally used as substrates for a variety of recombination and recursive recombination reactions, in addition to standard cloning methods as set forth in, e.g., Ausubel, Berger and Sambrook, i.e., to produce additional pesticidal polypeptide homologues and fragments thereof with desired properties. A variety of such reactions are known, including those developed by the inventors and their co-workers. Methods for producing a variant of any nucleic acid listed herein comprising recursively recombining such polynucleotide with a second (or more) polynucleotide, thus forming a library of variant polynucleotides are also embodiments of the disclosure, as are the libraries produced, the cells comprising the libraries and any recombinant polynucleotide produces by such methods. Additionally, such methods optionally comprise selecting a variant polynucleotide from such libraries based on pesticidal activity, as is wherein such recursive recombination is done in vitro or in vivo.

[0099] A variety of diversity generating protocols, including nucleic acid recursive recombination protocols are available and fully described in the art. The procedures can be used separately, and/or in combination to produce one or more variants of a nucleic acid or set of nucleic acids, as well as variants of encoded proteins. Individually and collectively, these procedures provide robust, widely applicable ways of generating diversified nucleic acids and sets of nucleic acids (including, e.g., nucleic acid libraries) useful, e.g., for the engineering or rapid evolution of nucleic acids, proteins, pathways, cells and/or organisms with new and/or improved characteristics.

[0100] While distinctions and classifications are made in the course of the ensuing discussion for clarity, it will be appreciated that the techniques are often not mutually exclusive. Indeed, the various methods can be used singly or in combination, in parallel or in series, to access diverse sequence variants.

[0101] The result of any of the diversity generating procedures described herein can be the generation of one or more nucleic acids, which can be selected or screened for nucleic acids with or which confer desirable properties or that encode proteins with or which confer desirable properties. Following diversification by one or more of the methods herein or otherwise available to one of skill, any nucleic acids that are produced can be selected for a desired activity or property, e.g. pesticidal activity or, such activity at a desired pH, etc. This can include identifying any activity that can be detected, for example, in an automated or automatable format, by any of the assays in the art, see, e.g., discussion of screening of insecticidal activity, infra. A variety of related (or even unrelated) properties can be evaluated, in serial or in parallel, at the discretion of the practitioner.

[0102] Descriptions of a variety of diversity generating procedures for generating modified nucleic acid sequences, e.g., those coding for polypeptides having pesticidal activity or fragments thereof, are found in the following publications and the references cited therein: Soong, et al., (2000) Nat Genet 25(4):436-439; Stemmer, et al., (1999) Tumor Targeting 4:1-4; Ness, et al., (1999) Nat Biotechnol 17:893-896; Chang, et al., (1999) Nat Biotechnol 17:793-797; Minshull and Stemmer, (1999) Curr Opin Chem Biol 3:284-290; Christians, et al., (1999) Nat Biotechnol 17:259-264; Crameri, et al., (1998) Nature 391:288-291; Crameri, et al., (1997) Nat Biotechnol 15:436-438; Zhang, et al., (1997) PNAS USA 94:4504-4509; Patten, et al., (1997) Curr Opin Biotechnol 8:724-733; Crameri, et al., (1996) Nat Med 2:100-103; Crameri, et al., (1996) Nat Biotechnol 14:315-319; Gates, et al., (1996) J Mol Biol 255:373-386; Stemmer, (1996) “Sexual PCR and Assembly PCR” In: The Encyclopedia of Molecular Biology. VCH Publishers, New York. pp. 447-457; Crameri and Stemmer, (1995) BioTechniques 18:194-195; Stemmer, et al., (1995) Gene, 164:49-53; Stemmer, (1995) Science 270: 1510; Stemmer, (1995) Bio/Technology 13:549-553; Stemmer, (1994) Nature 370:389-391 and Stemmer, (1994) PNAS USA 91:10747-10751.

[0103] Mutational methods of generating diversity include, for example, site-directed mutagenesis (Ling, et al., (1997) Anal Biochem 254(2):157-178; Dale, et al., (1996) Methods Mol Biol 57:369-374; Smith, (1985) Ann Rev Genet 19:423-462; Botstein and Shortle, (1985) Science 229:1193-1201; Carter, (1986) Biochem J 237:1-7 and Kunkel, (1987) “The efficiency of oligonucleotide directed mutagenesis” in Nucleic Acids & Molecular Biology (Eckstein and Lilley, eds., Springer Verlag, Berlin)); mutagenesis using uracil containing templates (Kunkel, (1985) PNAS USA 82:488-492; Kunkel, et al., (1987) Methods Enzymol 154:367-382 and Bass, et al., (1988) Science 242:240-245); oligonucleotide-directed mutagenesis (Zoller and Smith, (1983) Methods Enzymol 100:468-500; Zoller and Smith, (1987) Methods Enzymol 154:329-350 (1987); Zoller and Smith, (1982) Nucleic Acids Res 10:6487-6500), phosphorothioate-modified DNA mutagenesis (Taylor, et al., (1985) Nucl Acids Res 13:8749-8764; Taylor, et al., (1985) Nucl Acids Res 13:8765-8787 (1985); Nakamaye and Eckstein, (1986) Nucl Acids Res 14:9679-9698; Sayers, et al., (1988) Nucl Acids Res 16:791-802 and Sayers, et al., (1988) Nucl Acids Res 16:803-814); mutagenesis using gapped duplex DNA (Kramer, et al., (1984) Nucl Acids Res 12:9441-9456; Kramer and Fritz, (1987) Methods Enzymol 154:350-367; Kramer, et al., (1988) Nucl Acids Res 16:7207 and Fritz, et al., (1988) Nucl Acids Res 16:6987-6999).

[0104] Additional suitable methods include point mismatch repair (Kramer, et al., (1984) Cell 38:879-887), mutagenesis using repair-deficient host strains (Carter, et al., (1985) Nucl Acids Res 13:4431-4443 and Carter, (1987) Methods in Enzymol 154:382-403), deletion mutagenesis (Eghtedarzadeh and Henikoff, (1986) Nucl Acids Res 14:5115), restriction-selection and restriction-purification (Wells, et al., (1986) Phil Trans R Soc Lond A 317:415-423), mutagenesis by total gene synthesis (Nambiar, et al., (1984) Science 223:1299-1301; Sakamar and Khorana, (1988) Nucl Acids Res 14:6361-6372; Wells, et al., (1985) Gene 34:315-323 and Grundström, et al., (1985) Nucl Acids Res 13:3305-3316), double-strand break repair (Mandecki, (1986) PNAS USA, 83:7177-7181 and Arnold, (1993) Curr Opin Biotech 4:450-455). Additional details on many of the above methods can be found in Methods Enzymol Volume 154, which also describes useful controls for trouble-shooting problems with various mutagenesis methods.

[0105] Additional details regarding various diversity generating methods can be found in the following US Patents, PCT Publications and Applications and EPO publications: U.S. Pat. Nos. 5,723,323, 5,763,192, 5,814,476, 5,817,483, 5,824,514, 5,976,862, 5,605,793, 5,811,238, 5,830,721, 5,834,252, 5,837,458, WO 1995/22625, WO 1996/33207, WO 1997/20078, WO 1997/35966, WO 1999/41402, WO 1999/41383, WO 1999/41369, WO 1999/41368, EP 752008, EP 0932670, WO 1999/23107, WO 1999/21979, WO 1998/31837, WO 1998/27230, WO 1998/27230, WO 2000/00632, WO 2000/09679, WO 1998/42832, WO 1999/29902, WO 1998/41653, WO 1998/41622, WO 1998/42727, WO 2000/18906, WO 2000/04190, WO 2000/42561, WO 2000/42559, WO 2000/42560, WO 2001/23401 and PCT/US01/06775.

[0106] The nucleotide sequences of the embodiments can also be used to isolate corresponding sequences from ferns or other primitive plant, particularly a Asplenium, Polypodium, Adiantum, Platycerium, Nephrolepis, Ophioglossum, Colysis, Bolbitis, Blechnum, Selaginella, Lycopodium, and Huperzia species. In this manner, methods such as PCR, hybridization, and the like can be used to identify such sequences based on their sequence homology to the sequences set forth herein. Sequences that are selected based on their sequence identity to the entire sequences set forth herein or to fragments thereof are encompassed by the embodiments. Such sequences include sequences that are orthologs of the disclosed sequences. The term “orthologs” refers to genes derived from a common ancestral gene and which are found in different species as a result of speciation. Genes found in different species are considered orthologs when their nucleotide sequences and/or their encoded protein sequences share substantial identity as defined elsewhere herein. Functions of orthologs are often highly conserved among species.

[0107] In a PCR approach, oligonucleotide primers can be designed for use in PCR reactions to amplify corresponding DNA sequences from cDNA or genomic DNA extracted from any organism of interest. Methods for designing PCR primers and PCR cloning are generally known in the art and are disclosed in Sambrook, et al., (1989) Molecular Cloning: A Laboratory Manual (2d ed., Cold Spring Harbor Laboratory Press, Plainview, New York), hereinafter “Sambrook”. See also, Innis, et al., eds. (1990) PCR Protocols: A Guide to Methods and Applications (Academic Press, New York); Innis and Gelfand, eds. (1995) PCR Strategies (Academic Press, New York); and Innis and Gelfand, eds. (1999) PCR Methods Manual (Academic Press, New York). Known methods of PCR include, but are not limited to, methods using paired primers, nested primers, single specific primers, degenerate primers, gene-specific primers, vector-specific primers, partially-mismatched primers, and the like.

[0108] To identify potential PtIP-83 polypeptides from fern or moss collections, the fern or moss cell lysates can be screened with antibodies generated against a PtIP-83 polypeptides and/or PtIP-83 polypeptides using Western blotting and/or ELISA methods. This type of assays can be performed in a high throughput fashion. Positive samples can be further analyzed by various techniques such as antibody based protein purification and identification. Methods of generating antibodies are well known in the art as discussed infra.

[0109] Alternatively, mass spectrometry based protein identification method can be used to identify homologs of PtIP-83 polypeptides using protocols in the literatures (Scott Patterson, (1998), 10.22, 1-24, Current Protocol in Molecular Biology published by John Wiley & Son Inc). Specifically, LC-MS/MS based protein identification method is used to associate the MS data of given cell lysate or desired molecular weight enriched samples (excised from SDS-PAGE gel of relevant molecular weight bands to PtIP-83 polypeptides) with sequence information of PtIP-83 polypeptides SEQ ID NO: 1, SEQ ID NO: 3, SEQ ID NO: 5, SEQ ID NO: 7, SEQ ID NO: 9, SEQ ID NO: 11, SEQ ID NO: 13, SEQ ID NO: 15, SEQ ID NO: 17, SEQ ID NO: 19, SEQ ID NO: 21, SEQ ID NO: 23, SEQ ID NO: 716, SEQ ID NO: 754, SEQ ID NO: 755, SEQ ID NO: 756, SEQ ID NO: 757, SEQ ID NO: 758, SEQ ID NO: 759, SEQ ID NO: 760, SEQ ID NO: 761, SEQ ID NO: 762, SEQ ID NO: 763, SEQ ID NO: 764, SEQ ID NO: 765, SEQ ID NO: 766, SEQ ID NO: 767, SEQ ID NO: 768 or SEQ ID NO: 769 and their homologs. Any match in peptide sequences indicates the potential of having the homologous proteins in the samples. Additional techniques (protein purification and molecular biology) can be used to isolate the protein and identify the sequences of the homologs.

[0110] In hybridization methods, all or part of the pesticidal nucleic acid sequence can be used to screen cDNA or genomic libraries. Methods for construction of such cDNA and genomic libraries are generally known in the art and are disclosed in Sambrook and Russell, (2001), supra. The so-called hybridization probes may be genomic DNA fragments, cDNA fragments, RNA fragments or other oligonucleotides and may be labeled with a detectable group such as 32P or any other detectable marker, such as other radioisotopes, a fluorescent compound, an enzyme or an enzyme co-factor. Probes for hybridization can be made by labeling synthetic oligonucleotides based on the known PtIP-83 polypeptide-encoding nucleic acid sequence disclosed herein. Degenerate primers designed on the basis of conserved nucleotides or amino acid residues in the nucleic acid sequence or encoded amino acid sequence can additionally be used. The probe typically comprises a region of nucleic acid sequence that hybridizes under stringent conditions to at least about 12, at least about 25, at least about 50, 75, 100, 125, 150, 175 or 200 consecutive nucleotides of nucleic acid sequence encoding a PtIP-83 polypeptide of the disclosure or a fragment or variant thereof. Methods for the preparation of probes for hybridization are generally known in the art and are disclosed in Sambrook and Russell, (2001), supra, herein incorporated by reference.

[0111] For example, an entire nucleic acid sequence, encoding a PtIP-83 polypeptide, disclosed herein or one or more portions thereof may be used as a probe capable of specifically hybridizing to corresponding nucleic acid sequences encoding PtIP-83 polypeptide-like sequences and messenger RNAs. To achieve specific hybridization under a variety of conditions, such probes include sequences that are unique and are preferably at least about 10 nucleotides in length or at least about 20 nucleotides in length. Such probes may be used to amplify corresponding pesticidal sequences from a chosen organism by PCR. This technique may be used to isolate additional coding sequences from a desired organism or as a diagnostic assay to determine the presence of coding sequences in an organism. Hybridization techniques include hybridization screening of plated DNA libraries (either plaques or colonies; see, for example, Sambrook, et al., (1989) Molecular Cloning: A Laboratory Manual (2d ed., Cold Spring Harbor Laboratory Press, Cold Spring Harbor, N.Y.).

[0112] Hybridization of such sequences may be carried out under stringent conditions. “Stringent conditions” or “stringent hybridization conditions” is used herein to refer to conditions under which a probe will hybridize to its target sequence to a detectably greater degree than to other sequences (e.g., at least 2-fold over background). Stringent conditions are sequence-dependent and will be different in different circumstances. By controlling the stringency of the hybridization and/or washing conditions, target sequences that are 100% complementary to the probe can be identified (homologous probing). Alternatively, stringency conditions can be adjusted to allow some mismatching in sequences so that lower degrees of similarity are detected (heterologous probing). Generally, a probe is less than about 1000 nucleotides in length, preferably less than 500 nucleotides in length.

[0113] Typically, stringent conditions will be those in which the salt concentration is less than about 1.5 M Na ion, typically about 0.01 to 1.0 M Na ion concentration (or other salts) at pH 7.0 to 8.3 and the temperature is at least about 30° C. for short probes (e.g., 10 to 50 nucleotides) and at least about 60° C. for long probes (e.g., greater than 50 nucleotides). Stringent conditions may also be achieved with the addition of destabilizing agents such as formamide. Exemplary low stringency conditions include hybridization with a buffer solution of 30 to 35% formamide, 1 M NaCl, 1% SDS (sodium dodecyl sulphate) at 37° C., and a wash in 1× to 2×SSC (20×SSC=3.0 M NaCl/0.3 M trisodium citrate) at 50 to 55° C. Exemplary moderate stringency conditions include hybridization in 40 to 45% formamide, 1.0 M NaCl, 1% SDS at 37° C., and a wash in 0.5× to 1×SSC at 55 to 60° C. Exemplary high stringency conditions include hybridization in 50% formamide, 1 M NaCl, 1% SDS at 37° C., and a wash in 0.1×SSC at 60 to 65° C. Optionally, wash buffers may comprise about 0.1% to about 1% SDS. Duration of hybridization is generally less than about 24 hours, usually about 4 to about 12 hours.

[0114] Specificity is typically the function of post-hybridization washes, the critical factors being the ionic strength and temperature of the final wash solution. For DNA-DNA hybrids, the Tm can be approximated from the equation of Meinkoth and Wahl, (1984) Anal. Biochem. 138:267-284: Tm=81.5° C.+16.6 (log M)+0.41 (% GC)−0.61 (% form)−500/L; where M is the molarity of monovalent cations, % GC is the percentage of guanosine and cytosine nucleotides in the DNA, % form is the percentage of formamide in the hybridization solution, and L is the length of the hybrid in base pairs. The Tm is the temperature (under defined ionic strength and pH) at which 50% of a complementary target sequence hybridizes to a perfectly matched probe. Tm is reduced by about 1° C. for each 1% of mismatching; thus, Tm, hybridization, and/or wash conditions can be adjusted to hybridize to sequences of the desired identity. For example, if sequences with ≥90% identity are sought, the Tm can be decreased 10° C. Generally, stringent conditions are selected to be about 5° C. lower than the thermal melting point (Tm) for the specific sequence and its complement at a defined ionic strength and pH. However, severely stringent conditions can utilize a hybridization and/or wash at 1, 2, 3 or 4° C. lower than the thermal melting point (Tm); moderately stringent conditions can utilize a hybridization and/or wash at 6, 7, 8, 9 or 10° C. lower than the thermal melting point (Tm); low stringency conditions can utilize a hybridization and/or wash at 11, 12, 13, 14, 15 or 20° C. lower than the thermal melting point (Tm). Using the equation, hybridization and wash compositions, and desired Tm, those of ordinary skill will understand that variations in the stringency of hybridization and/or wash solutions are inherently described. If the desired degree of mismatching results in a Tm of less than 45° C. (aqueous solution) or 32° C. (formamide solution), it is preferred to increase the SSC concentration so that a higher temperature can be used. An extensive guide to the hybridization of nucleic acids is found in Tijssen, (1993) Laboratory Techniques in Biochemistry and Molecular Biology-Hybridization with Nucleic Acid Probes, Part I, Chapter 2 (Elsevier, N.Y.); and Ausubel, et al., eds. (1995) Current Protocols in Molecular Biology, Chapter 2 (Greene Publishing and Wiley-Interscience, New York). See, Sambrook, et al., (1989) Molecular Cloning: A Laboratory Manual (2d ed., Cold Spring Harbor Laboratory Press, Cold Spring Harbor, N.Y.).

[0115] In some embodiments polynucleotides are provided encoding a PtIP-83 polypeptide comprising an amino acid sequence having at least 80%, at least 85%, at least 90%, at least 95%, at least 96%, at least 97%, at least 98% or at least 99% sequence identity to any one of SEQ ID NO: 786-888.

[0116] In some embodiments polynucleotides are provided encoding a PtIP-83 polypeptide comprising the amino acid sequence of any one of SEQ ID NO: 786-888.

[0117] In some embodiments the polynucleotide encoding the PtIP-83 polypeptide comprising the amino acid sequence of any one of SEQ ID NO: 786-888 is a non-genomic sequence.

[0118] In some embodiments the polynucleotide encoding the PtIP-83 polypeptide comprising the amino acid sequence of any one of SEQ ID NO: 786-888 is a cDNA.

### Proteins and Variants and Fragments Thereof

[0119] PtIP-83 polypeptides are also encompassed by the disclosure. “Pteridophyta Insecticidal Protein-83” “PtIP-83 polypeptide”, and “PtIP-83 protein” as used herein interchangeably refers to a polypeptide having insecticidal activity including but not limited to insecticidal activity against one or more insect pests of the Lepidoptera and/or Coleoptera orders, and is sufficiently homologous to the protein of SEQ ID NO: 1. A variety of PtIP-83 polypeptides are contemplated. Sources of PtIP-83 polypeptides or related proteins are fern species selected from but not limited to Polypodium punctatum, Lygodium flexuosum, Microsorum musifolium, Adiantum peruvianum, Adiantum trapeziforme and Adiantum pedatum.

[0120] “Sufficiently homologous” is used herein to refer to an amino acid sequence that has at least about 40%, 45%, 50%, 51%, 52%, 53%, 54%, 55%, 56%, 57%, 58%, 59%, 60%, 61%, 62%, 63%, 64%, 65%, 66%, 67%, 68%, 69%, 70%, 71%, 72%, 73%, 74%, 75%, 76%, 77%, 78%, 79%, 80%, 81%, 82%, 83%, 84%, 85%, 86%, 87%, 88%, 89%, 90%, 91%, 92, 93%, 94%, 95%, 96%, 97%, 98%, 99% or greater sequence homology compared to a reference sequence using one of the alignment programs described herein using standard parameters. In some embodiments the sequence homology is against the full length sequence of a PtIP-83 polypeptide. In some embodiments the PtIP-83 polypeptide has at least about 40, 45%, 50%, 51%, 52, 53%, 54%, 55%, 56%, 57%, 58%, 59%, 60%, 61%, 62%, 63%, 64%, 65%, 66%, 67%, 68%, 69%, 70%, 71%, 72%, 73%, 74%, 75%, 76%, 77%, 78%, 79%, 80%, 81%, 82%, 83%, 84%, 85%, 86%, 87%, 88%, 89%, 90%, 91%, 92%, 93%, 94%, 95%, 96%, 97%, 98%, 99% or greater sequence identity compared to SEQ ID NO: 1. One of skill in the art will recognize that these values can be appropriately adjusted to determine corresponding homology of proteins taking into account amino acid similarity and the like. In some embodiments the sequence identity is calculated using ClustalW algorithm in the ALIGNX® module of the Vector NTI® Program Suite (Invitrogen Corporation, Carlsbad, Calif.) with all default parameters. In some embodiments the sequence identity is across the entire length of polypeptide calculated using ClustalW algorithm in the ALIGNX® module of the Vector NTI® Program Suite (Invitrogen Corporation, Carlsbad, Calif.) with all default parameters.

[0121] As used herein, the terms “protein,” “peptide molecule,” or “polypeptide” includes any molecule that comprises five or more amino acids. It is well known in the art that protein, peptide or polypeptide molecules may undergo modification, including post-translational modifications, such as, but not limited to, disulfide bond formation, glycosylation, phosphorylation or oligomerization. Thus, as used herein, the terms “protein,” “peptide molecule” or “polypeptide” includes any protein that is modified by any biological or non-biological process. The terms “amino acid” and “amino acids” refer to all naturally occurring L-amino acids.

[0122] A “recombinant protein” or “recombinant polypeptide” is used herein to refer to a protein that is no longer in its natural environment, for example in vitro or in a recombinant bacterial or plant host cell. A “purified protein” or “purified polypeptide” is used herein to refer to a protein that is substantially free of cellular material. A PtIP-83 polypeptide that is substantially free of cellular material includes preparations of protein having less than about 30%, 20%, 10% or 5% (by dry weight) of non-pesticidal protein (also referred to herein as a “contaminating protein”).

[0123] “Fragments” or “biologically active portions” include polypeptide fragments comprising amino acid sequences sufficiently identical to a PtIP-83 polypeptide and that exhibit insecticidal activity. “Fragments” or “biologically active portions” of PtIP-83 polypeptides includes fragments comprising amino acid sequences sufficiently identical to the amino acid sequence set forth in SEQ ID NO: 1, SEQ ID NO: 3, SEQ ID NO: 5, SEQ ID NO: 7, SEQ ID NO: 9, SEQ ID NO: 11, SEQ ID NO: 13, SEQ ID NO: 15, SEQ ID NO: 17, SEQ ID NO: 19, SEQ ID NO: 21, SEQ ID NO: 23, SEQ ID NO: 716, SEQ ID NO: 754, SEQ ID NO: 755, SEQ ID NO: 756, SEQ ID NO: 757, SEQ ID NO: 758, SEQ ID NO: 759, SEQ ID NO: 760, SEQ ID NO: 761, SEQ ID NO: 762, SEQ ID NO: 763, SEQ ID NO: 764, SEQ ID NO: 765, SEQ ID NO: 766, SEQ ID NO: 767, SEQ ID NO: 768 or SEQ ID NO: 769, wherein the PtIP-83 polypeptide has insecticidal activity. Such biologically active portions can be prepared by recombinant techniques and evaluated for insecticidal activity. In some embodiments, the PtIP-83 polypeptide fragment is an N-terminal and/or a C-terminal truncation of at least about 1, 2, 3, 4, 5, 6, 7, 8, 9, 10, 11, 12, 13, 14, 15, 16, 17, 18, 19, 20, 25, 26, 27, 28, 29, 30, 31, 32, 33, 34 or more amino acids from the N-terminus and/or C-terminus relative to SEQ ID NO: 1, SEQ ID NO: 3, SEQ ID NO: 5, SEQ ID NO: 7, SEQ ID NO: 9, SEQ ID NO: 11, SEQ ID NO: 13, SEQ ID NO: 15, SEQ ID NO: 17, SEQ ID NO: 19, SEQ ID NO: 21, SEQ ID NO: 23, SEQ ID NO: 716, SEQ ID NO: 754, SEQ ID NO: 755, SEQ ID NO: 756, SEQ ID NO: 757, SEQ ID NO: 758, SEQ ID NO: 759, SEQ ID NO: 760, SEQ ID NO: 761, SEQ ID NO: 762, SEQ ID NO: 763, SEQ ID NO: 764, SEQ ID NO: 765, SEQ ID NO: 766, SEQ ID NO: 767, SEQ ID NO: 768 or SEQ ID NO: 769, e.g., by proteolysis, by insertion of a start codon, by deletion of the codons encoding the deleted amino acids and concomitant insertion of a start codon, and/or insertion of a stop codon.

[0124] In some embodiments, the PtIP-83 polypeptide fragments encompassed herein result from the removal of the N-terminal 1, 2, 3, 4, 5, 6, 7, 8, 9 or 10 or more amino acids relative to SEQ ID NO: 1, SEQ ID NO: 3, SEQ ID NO: 5, SEQ ID NO: 7, SEQ ID NO: 9, SEQ ID NO: 11, SEQ ID NO: 13, SEQ ID NO: 15, SEQ ID NO: 17, SEQ ID NO: 19, SEQ ID NO: 21, SEQ ID NO: 23, SEQ ID NO: 716, SEQ ID NO: 754, SEQ ID NO: 755, SEQ ID NO: 756, SEQ ID NO: 757, SEQ ID NO: 758, SEQ ID NO: 759, SEQ ID NO: 760, SEQ ID NO: 761, SEQ ID NO: 762, SEQ ID NO: 763, SEQ ID NO: 764, SEQ ID NO: 765, SEQ ID NO: 766, SEQ ID NO: 767, SEQ ID NO: 768, SEQ ID NO: 769 or variants thereof, e.g., by proteolysis or by insertion of a start codon, by deletion of the codons encoding the deleted amino acids and concomitant insertion of a start codon.

[0125] “Variants” as used herein refers to proteins or polypeptides having an amino acid sequence that is at least about 50%, 55%, 60%, 65%, 70%, 75%, 80%, 81%, 82%, 83%, 84%, 85%, 86%, 87%, 88%, 89%, 90%, 91%, 92%, 93%, 94%, 95%, 96%, 97%, 98% or 99% identical to the parental amino acid sequence.

[0126] In some embodiments a PtIP-83 polypeptide comprises an amino acid sequence having at least 40%, 45%, 50%, 51%, 52%, 53%, 54%, 55%, 56%, 57%, 58%, 59%, 60%, 61%, 62%, 63%, 64%, 65%, 66%, 67%, 68%, 69%, 70%, 71%, 72%, 73%, 74%, 75%, 76%, 77%, 78%, 79%, 80%, 81%, 82%, 83%, 84%, 85%, 86%, 87%, 88%, 89%, 90°/a, 91%, 92%, 93%, 94%, 95%, 96%, 97%, 98% or 99% identity to the amino acid sequence of SEQ ID NO: 1, SEQ ID NO: 3, SEQ ID NO: 5, SEQ ID NO: 7, SEQ ID NO: 9, SEQ ID NO: 11, SEQ ID NO: 13, SEQ ID NO: 15, SEQ ID NO: 17, SEQ ID NO: 19, SEQ ID NO: 21, SEQ ID NO: 23, SEQ ID NO: 716, SEQ ID NO: 754, SEQ ID NO: 755, SEQ ID NO: 756, SEQ ID NO: 757, SEQ ID NO: 758, SEQ ID NO: 759, SEQ ID NO: 760, SEQ ID NO: 761, SEQ ID NO: 762, SEQ ID NO: 763, SEQ ID NO: 764, SEQ ID NO: 765, SEQ ID NO: 766, SEQ ID NO: 767, SEQ ID NO: 768 or SEQ ID NO: 769, wherein the PtIP-83 polypeptide has insecticidal activity.

[0127] In some embodiments a PtIP-83 polypeptide comprises an amino acid sequence having at least about 80%, 81%, 82%, 83%, 84%, 85%, 86%, 87%, 88%, 89%, 90%, 91%, 92%, 93%, 94%, 95%, 96%, 97%, 98% or 99% identity across the entire length of the amino acid sequence of SEQ ID NO: 1, SEQ ID NO: 3, SEQ ID NO: 5, SEQ ID NO: 7, SEQ ID NO: 9, SEQ ID NO: 11, SEQ ID NO: 13, SEQ ID NO: 15, SEQ ID NO: 17, SEQ ID NO: 19, SEQ ID NO: 21, SEQ ID NO: 23, SEQ ID NO: 716, SEQ ID NO: 754, SEQ ID NO: 755, SEQ ID NO: 756, SEQ ID NO: 757, SEQ ID NO: 758, SEQ ID NO: 759, SEQ ID NO: 760, SEQ ID NO: 761, SEQ ID NO: 762, SEQ ID NO: 763, SEQ ID NO: 764, SEQ ID NO: 765, SEQ ID NO: 766, SEQ ID NO: 767, SEQ ID NO: 768 or SEQ ID NO: 769.

[0128] In some embodiments a PtIP-83 polypeptide comprises an amino acid sequence having at least about 80%, 81%, 82%, 83%, 84%, 85%, 86%, 87%, 88%, 89%, 90%, 91%, 92%, 93%, 94%, 95%, 96%, 97%, 98% or 99% identity across the entire length of the amino acid sequence of SEQ ID NO: 1, SEQ ID NO: 3, SEQ ID NO: 5, SEQ ID NO: 7, SEQ ID NO: 9, SEQ ID NO: 11, SEQ ID NO: 13, SEQ ID NO: 15, SEQ ID NO: 17, SEQ ID NO: 19, SEQ ID NO: 21, SEQ ID NO: 23, SEQ ID NO: 716, SEQ ID NO: 754, SEQ ID NO: 755, SEQ ID NO: 756, SEQ ID NO: 757, SEQ ID NO: 758, SEQ ID NO: 759, SEQ ID NO: 760, SEQ ID NO: 761, SEQ ID NO: 762, SEQ ID NO: 763, SEQ ID NO: 764, SEQ ID NO: 765, SEQ ID NO: 766, SEQ ID NO: 767, SEQ ID NO: 768 or SEQ ID NO: 769, and has at least one amino acid substitution, deletion, insertion, and/or addition at the N-terminus or C-terminus compared to the native sequence of SEQ ID NO: 1, SEQ ID NO: 3, SEQ ID NO: 5, SEQ ID NO: 7, SEQ ID NO: 9, SEQ ID NO: 11, SEQ ID NO: 13, SEQ ID NO: 15, SEQ ID NO: 17, SEQ ID NO: 19, SEQ ID NO: 21, SEQ ID NO: 23, SEQ ID NO: 716, SEQ ID NO: 754, SEQ ID NO: 755, SEQ ID NO: 756, SEQ ID NO: 757, SEQ ID NO: 758, SEQ ID NO: 759, SEQ ID NO: 760, SEQ ID NO: 761, SEQ ID NO: 762, SEQ ID NO: 763, SEQ ID NO: 764, SEQ ID NO: 765, SEQ ID NO: 766, SEQ ID NO: 767, SEQ ID NO: 768 or SEQ ID NO: 769.

[0129] In some embodiments a PtIP-83 polypeptide comprises an amino acid sequence of SEQ ID NO: 1, SEQ ID NO: 3, SEQ ID NO: 5, SEQ ID NO: 7, SEQ ID NO: 9, SEQ ID NO: 11, SEQ ID NO: 13, SEQ ID NO: 15, SEQ ID NO: 17, SEQ ID NO: 19, SEQ ID NO: 21, SEQ ID NO: 23, SEQ ID NO: 716, SEQ ID NO: 754, SEQ ID NO: 755, SEQ ID NO: 756, SEQ ID NO: 757, SEQ ID NO: 758, SEQ ID NO: 759, SEQ ID NO: 760, SEQ ID NO: 761, SEQ ID NO: 762, SEQ ID NO: 763, SEQ ID NO: 764, SEQ ID NO: 765, SEQ ID NO: 766, SEQ ID NO: 767, SEQ ID NO: 768 or SEQ ID NO: 769 having 1, 2, 3, 4, 5, 6,7,8,9,1011,12,13,14,15,16,17,18,19, 20, 21, 22, 23, 24, 25, 26, 27, 28, 29, 30, 31, 32, 33, 34, 35, 36, 37, 38, 39, 40, 41, 42, 43, 44, 45, 46, 47, 48, 49, 50, 51, 52, 53, 54, 55, 56, 57, 58, 59, 60, 61, 62, 63, 64, 65, 66, 67, 68, 69, 70 or more amino acid substitutions compared to the native amino acid at the corresponding position of SEQ ID NO: 1, SEQ ID NO: 3, SEQ ID NO: 5, SEQ ID NO: 7, SEQ ID NO: 9, SEQ ID NO: 11, SEQ ID NO: 13, SEQ ID NO: 15, SEQ ID NO: 17, SEQ ID NO: 19, SEQ ID NO: 21, SEQ ID NO: 23, SEQ ID NO: 716, SEQ ID NO: 754, SEQ ID NO: 755, SEQ ID NO: 756, SEQ ID NO: 757, SEQ ID NO: 758, SEQ ID NO: 759, SEQ ID NO: 760, SEQ ID NO: 761, SEQ ID NO: 762, SEQ ID NO: 763, SEQ ID NO: 764, SEQ ID NO: 765, SEQ ID NO: 766, SEQ ID NO: 767, SEQ ID NO: 768 or SEQ ID NO: 769.

[0130] In some embodiments the sequence identity is across the entire length of the polypeptide calculated using ClustalW algorithm in the ALIGNX® module of the Vector NTI® Program Suite (Invitrogen Corporation, Carlsbad, Calif.) with all default parameters.

[0131] In some embodiments a PtIP-83 polypeptide comprises an amino acid sequence having 1, 2, 3,4,5,6, 7,8, 9, 10 11, 12, 13, 14, 15, 16, 17, 18, 19, 20, 21, 22, 23, 24, 25, 26, 27, 28, 29, 30, 31, 32, 33, 34, 35, 36, 37, 38, 39, 40, 41, 42, 43, 44, 45, 46, 47, 48, 49, 50, 51, 52, 53, 54, 55, 56, 57, 58, 59 or 60 amino acid substitutions, in any combination, compared to the native amino acid at the corresponding position of SEQ ID NO: 1, SEQ ID NO: 3, SEQ ID NO: 5, SEQ ID NO: 7, SEQ ID NO: 9, SEQ ID NO: 11, SEQ ID NO: 13, SEQ ID NO: 15, SEQ ID NO: 17, SEQ ID NO: 19, SEQ ID NO: 21, SEQ ID NO: 23, SEQ ID NO: 716, SEQ ID NO: 754, SEQ ID NO: 755, SEQ ID NO: 756, SEQ ID NO: 757, SEQ ID NO: 758, SEQ ID NO: 759, SEQ ID NO: 760, SEQ ID NO: 761, SEQ ID NO: 762, SEQ ID NO: 763, SEQ ID NO: 764, SEQ ID NO: 765, SEQ ID NO: 766, SEQ ID NO: 767, SEQ ID NO: 768 or SEQ ID NO: 769.

[0132] In some embodiments a PtIP-83 polypeptide comprises an amino acid sequence having 1, 2, 3, 4, 5, 6, 7, 8, 9, 10 11, 12, 13, 14, 15, 16, 17, 18, 19, 20, 21, 22, 23, 24, 25, 26, 27, 28 or 29 amino acid substitutions, in any combination, compared to the native amino acid at the corresponding position of SEQ ID NO: 1, SEQ ID NO: 3, SEQ ID NO: 5, SEQ ID NO: 7, SEQ ID NO: 9, SEQ ID NO: 11, SEQ ID NO: 13, SEQ ID NO: 15, SEQ ID NO: 17, SEQ ID NO: 19, SEQ ID NO: 21, SEQ ID NO: 23, SEQ ID NO: 716, SEQ ID NO: 754, SEQ ID NO: 755, SEQ ID NO: 756, SEQ ID NO: 757, SEQ ID NO: 758, SEQ ID NO: 759, SEQ ID NO: 760, SEQ ID NO: 761, SEQ ID NO: 762, SEQ ID NO: 763, SEQ ID NO: 764, SEQ ID NO: 765, SEQ ID NO: 766, SEQ ID NO: 767, SEQ ID NO: 768 or SEQ ID NO: 769.

[0133] In some embodiments the PtIP-83 polypeptide comprises an amino acid sequence of SEQ ID NO: 1, SEQ ID NO: 3, SEQ ID NO: 5, SEQ ID NO: 7, SEQ ID NO: 9, SEQ ID NO: 11, SEQ ID NO: 13, SEQ ID NO: 15, SEQ ID NO: 17, SEQ ID NO: 19, SEQ ID NO: 21, SEQ ID NO: 23, SEQ ID NO: 716, SEQ ID NO: 754, SEQ ID NO: 755, SEQ ID NO: 756, SEQ ID NO: 757, SEQ ID NO: 758, SEQ ID NO: 759, SEQ ID NO: 760, SEQ ID NO: 761, SEQ ID NO: 762, SEQ ID NO: 763, SEQ ID NO: 764, SEQ ID NO: 765, SEQ ID NO: 766, SEQ ID NO: 767, SEQ ID NO: 768 or SEQ ID NO: 769.

[0134] In some embodiments the PtIP-83 polypeptide comprises a non-naturally occurring amino acid sequence. As used herein the term “non-naturally occurring amino acid sequence” means an amino acid sequence not found in nature.

[0135] In some embodiments the PtIP-83 polypeptide is not the polypeptide of SEQ ID NO: 1, SEQ ID NO: 3, SEQ ID NO: 5, SEQ ID NO: 7, SEQ ID NO: 9, SEQ ID NO: 11, SEQ ID NO: 13, SEQ ID NO: 15, SEQ ID NO: 17, SEQ ID NO: 19, SEQ ID NO: 21, SEQ ID NO: 23, SEQ ID NO: 716, SEQ ID NO: 754, SEQ ID NO: 755, SEQ ID NO: 756, SEQ ID NO: 757, SEQ ID NO: 758, SEQ ID NO: 759, SEQ ID NO: 760, SEQ ID NO: 761, SEQ ID NO: 762, SEQ ID NO: 763, SEQ ID NO: 764, SEQ ID NO: 765, SEQ ID NO: 766, SEQ ID NO: 767, SEQ ID NO: 768 or SEQ ID NO: 769.

[0136] In some embodiments the PtIP-83 polypeptide is a variant of the polypeptide of SEQ ID NO: 1, SEQ ID NO: 3, SEQ ID NO: 5, SEQ ID NO: 7, SEQ ID NO: 9, SEQ ID NO: 11, SEQ ID NO: 13, SEQ ID NO: 15, SEQ ID NO: 17, SEQ ID NO: 19, SEQ ID NO: 21, SEQ ID NO: 23, SEQ ID NO: 716, SEQ ID NO: 754, SEQ ID NO: 755, SEQ ID NO: 756, SEQ ID NO: 757, SEQ ID NO: 758, SEQ ID NO: 759, SEQ ID NO: 760, SEQ ID NO: 761, SEQ ID NO: 762, SEQ ID NO: 763, SEQ ID NO: 764, SEQ ID NO: 765, SEQ ID NO: 766, SEQ ID NO: 767, SEQ ID NO: 768 or SEQ ID NO: 769, wherein the PtIP-83 polypeptide variant has at least one amino acid substitution, deletion, insertion, and/or addition at the N-terminus or C-terminus compared to SEQ ID NO: 1, SEQ ID NO: 3, SEQ ID NO: 5, SEQ ID NO: 7, SEQ ID NO: 9, SEQ ID NO: 11, SEQ ID NO: 13, SEQ ID NO: 15, SEQ ID NO: 17, SEQ ID NO: 19, SEQ ID NO: 21, SEQ ID NO: 23, SEQ ID NO: 716, SEQ ID NO: 754, SEQ ID NO: 755, SEQ ID NO: 756, SEQ ID NO: 757, SEQ ID NO: 758, SEQ ID NO: 759, SEQ ID NO: 760, SEQ ID NO: 761, SEQ ID NO: 762, SEQ ID NO: 763, SEQ ID NO: 764, SEQ ID NO: 765, SEQ ID NO: 766, SEQ ID NO: 767, SEQ ID NO: 768 or SEQ ID NO: 769.

[0137] In some embodiments PtIP-83 polypeptide comprising an amino acid sequence of any one of SEQ ID NO: 236-299, SEQ ID NO: 334-367, SEQ ID NO: 398-427, SEQ ID NO: 518-607, SEQ ID NO: 640-645, and SEQ ID NO: 728-737.

[0138] In some embodiments the PtIP-83 polypeptide is a variant of SEQ ID NO: 1, wherein the amino acid at position 53 is Val, Ala, Cys or Thr; the amino acid at position 54 is Lys, Ala, Cys, Asp, Glu, Gly, His, Ile, Leu, Met, Asn, Gln, Arg, Ser or Thr; the amino acid at position 55 is Arg, Ala, Asp, Glu, Phe, Gly, His, Lys, Leu, Met, Asn, Gln, Ser, Thr, Val, Trp or Tyr; the amino acid at position 56 is Leu, Glu, Phe, Ile, Met, Thr or Val; the amino acid at position 57 is Tyr, Cys, Ile, Leu, Met, Thr or Val; the amino acid at position 58 is Val, Cys, Ile or Leu; the amino acid at position 59 is Phe, Leu, Met, Val or Tyr; the amino acid at position 60 is Ala, Cys, Gly, Ser, Thr or Val; the amino acid at position 61 is Asp, Glu, His or Ser; the amino acid at position 62 is Val, Ala, Cys, Ile, Leu or Thr; the amino acid at position 63 is Val, Ala, Cys, Ile, Leu, Met or Thr; the amino acid at position 64 is Glu, Ala, Cys, Phe, Gly, His, Ile, Leu, Met, Asn, Gln, Arg, Ser, Thr, Val, Trp or Tyr; the amino acid at position 65 is Leu, Ala, Cys, Phe, His, Ile, Met, Asn, Gin, Thr, Val or Trp; the amino acid at position 66 is Pro, Asp, Gly, Met, Gln or Arg; the amino acid at position 363 is Gln, Ala, Cys, Glu, Phe, Gly, His, Lys, Leu, Asn, Arg, Ser, Thr, Val or Trp; the amino acid at position 364 is Ile, Ala, Cys, Glu, Phe, His, Lys, Leu, Met, Asn, Gln, Ser, Thr, Val, Trp or Tyr; the amino acid at position 365 is Leu, Ala, Glu, Phe, Gly, His, Ile, Lys, Met, Asn, Arg, Val, Trp or Tyr; the amino acid at position 366 is Gly, Ala, Cys, Phe, His, Ile, Lys, Leu, Met, Asn, Ser, Thr or Val; the amino acid at position 367 is Ser, Ala, Cys, Asp, Glu, Phe, Gly, His, Ile, Leu, Met, Asn, Pro, Gln, Arg, Thr, Val or Trp; the amino acid at position 368 is Tyr, Ala, Cys, Asp, Glu, Phe, Gly, His, Ile, Lys, Leu, Met, Asn, Pro, Gln, Arg, Ser, Thr, Val or Trp; the amino acid at position 369 is Leu, Ala, Cys, Asp, Phe, Gly, Ile, Met, Thr or Val; the amino acid at position 370 is Leu, Ala, Cys, Asp, Glu, Phe, Gly, His, Ile, Lys, Met, Gln, Arg, Ser, Thr, Val, Trp or Tyr; the amino acid at position 371 is Gln, Ala, Cys, Asp, Glu, Phe, Gly, Ile, Lys, Leu, Asn, Arg, Ser, Thr, Val or Trp; the amino acid at position 372 is Gln, Ala, Cys, Asp, Phe, Gly, His, Ile, Leu, Asn, Arg, Ser, Val or Tyr; the amino acid at position 373 is Asn, Ala, Cys, Asp, Phe, Gly, His, Ile, Lys, Gln, Ser, Thr, Val or Trp; the amino acid at position 556 is Trp, Phe, Thr or Tyr; the amino acid at position 557 is Arg, Cys, Asp, Gly, His, Ile, Lys, Leu, Met, Asn, Pro, Gln, Ser, Thr, Val, Trp or Tyr; the amino acid at position 558 is Ala, Cys, Asp, Phe, Gly, His, Ile, Lys, Leu, Asn, Pro, Gln, Arg, Ser, Val, Trp or Tyr; the amino acid at position 559 is Lys, Ala, Cys, Phe, Gly, His, Ile, Leu, Asn, Gln, Arg, Ser, Thr, Val or Tyr; the amino acid at position 560 is Cys, Ala, Phe, Gly, Ile, Met, Asn, Arg, Ser, Thr or Val; the amino acid at position 561 is Lys, Ala, Cys, Asp, Glu, Phe, Gly, His, Ile, Leu, Met, Asn, Arg, Ser, Thr, Val or Tyr; the amino acid at position 562 is Asn, Cys, Asp, Glu, Gly, His, Leu, Met, Arg, Ser, Thr, Val or Tyr; the amino acid at position 563 is Val, Ala, Cys, Asp, Phe, His, Ile, Leu, Met, Asn, Gln, Thr or Trp; the amino acid at position 564 is Ala, Cys, Gly, Met, Gln, Ser, Thr, Val, Trp or Tyr; the amino acid at position 646 is Leu, Ala, Cys, Gly, Ile, Met, Asn, Gln, Ser, Thr or Val; the amino acid at position 647 is Leu, Asp, Gly, Met, Asn, Gln or Thr; the amino acid at position 648 is Met, Ala, Cys, Asp, Glu, Phe, Gly, His, Lys, Leu, Asn, Pro, Gln, Arg, Ser, Thr, Val, Trp or Tyr; the amino acid at position 649 is Pro, Ala, Cys, Asp, Glu, Phe, Gly, His, Lys, Met, Asn, Gln, Arg, Ser, Thr, Trp or Tyr; the amino acid at position 650 is Thr, Ala, Cys, Asp, Phe, Gly, His, Ile, Lys, Leu, Met, Pro, Gln, Arg, Ser, Val or Tyr; the amino acid at position 651 is Glu, Ala, Cys, Asp, Gly, His, Ile, Leu, Met, Asn, Pro, Gln, Arg, Ser, Thr, Val or Tyr; the amino acid at position 652 is Leu, Cys, Phe, Ile, Lys, Met, Pro, Arg, Ser, Thr or Val; the amino acid at position 653 is Thr, Cys, Asp, Glu, Phe, Gly, His, Ile, Lys, Leu, Pro, Arg, Ser, Val or Trp; the amino acid at position 654 is Thr, Ala, Cys, Phe, Ile, Lys, Leu, Met, Pro, Arg, Ser, Val, Trp or Tyr; the amino acid at position 655 is Trp, Phe or Tyr; the amino acid at position 771 is Arg, Ala, Asp, Glu, Phe, Gly, His, Ile, Lys, Leu, Asn, Ser, Thr, Val, Trp or Tyr; the amino acid at position 772 is Arg, Ala, Cys, Asp, Glu, Phe, Gly, His, Ile, Lys, Leu, Met, Pro, Gln, Ser, Thr, Val, Trp or Tyr; the amino acid at position 773 is Asp, Ala, Glu, Phe, Gly, His, Ile, Lys, Leu, Met, Asn, Gln, Arg, Ser, Thr, Val, Trp or Tyr; the amino acid at position 774 is Gln, Ala, Asp, Gly, His, Ile, Lys, Leu, Met, Asn, Pro, Arg, Ser, Thr, Val, Trp or Tyr; the amino acid at position 775 is Val, Ala, Cys, Asp, Glu, Gly, His, Ile, Asn, Pro, Gln, Arg, Ser, Thr or Tyr; the amino acid at position 776 is Leu, Ala, Cys, Asp, Glu, Phe, Gly, His, Ile, Lys, Asn, Pro, Gln, Arg, Ser, Thr, Val or Tyr; the amino acid at position 777 is Pro, Ala, Cys, Asp, Glu, Phe, Gly, His, Lys, Leu, Met, Asn, Gln, Ser, Thr, Val, Trp or Tyr; the amino acid at position 778 is Phe, Ala, His, Ile, Leu, Met, Asn, Gln, Ser, Val, Trp or Tyr; the amino acid at position 779 is Gin, Ala, Cys, Asp, Glu, Gly, His, Lys, Leu, Asn, Pro, Arg, Ser, Thr or Val; the amino acid at position 780 is Ala, Cys, Asn, Pro, Gln or Ser; the amino acid at position 781 is Ala, Cys, Asp, Glu, Phe, Gly, His, Ile, Asn, Gln, Arg, Ser, Thr, Val, Trp or Tyr; the amino acid at position 782 is Ala, Cys, Asp, Glu, Phe, Gly, His, Ile, Lys, Met, Pro, Gln, Arg, Ser, Thr, Val, Trp or Tyr; the amino acid at position 783 is Pro, Ala, Cys, Asp, Glu, Gly, His, Asn, Gln, Arg, Ser, Thr or Val; the amino acid at position 784 is Leu, Ala, Glu, Phe, His, Ile, Lys, Met, Asn, Pro, Gln, Ser, Thr, Val or Trp; the amino acid at position 785 is Asn, Ala, Cys, Glu, Phe, Gly, His, Ile, Lys, Leu, Met, Gln, Arg, Ser, Thr, Val, Trp or Tyr; and the amino acid at position 786 is Tyr, Phe, Ile, Leu or Trp.

[0139] In some embodiments the PtIP-83 polypeptide is a variant of SEQ ID NO: 1, wherein the amino acid at position 1 is Met or deleted; the amino acid at position 2 is Ala or deleted; the amino acid at position 3 is Leu, Val or deleted; the amino acid at position 4 is Val, Met or Leu; the amino acid at position 7 is Gly or Ser; the amino acid at position 8 is Lys or Thr; the amino acid at position 10 is Phe or Tyr; the amino acid at position 11 is Glu or Arg; the amino acid at position 18 is Met or Ile; the amino acid at position 19 is Gly, Pro or Ala; the amino acid at position 20 is Val or deleted; the amino acid at position 21 is Leu or Val; the amino acid at position 23 is Arg or Gln; the amino acid at position 37 is Val or Leu; the amino acid at position 38 is Arg or Asn; the amino acid at position 40 is Ala or Ser; the amino acid at position 43 is Asn or Asp; the amino acid at position 45 is Gly or Ala; the amino acid at position 46 is Gln or Glu; the amino acid at position 48 is Glu, Pro or Val; the amino acid at position 51 is Glu or Gly; the amino acid at position 52 is Lys, Arg or Thr; the amino acid at position 56 is Leu or Val; the amino acid at position 59 is Phe or Leu; the amino acid at position 66 is Pro or Ala; the amino acid at position 67 is Val, Pro or Thr; the amino acid at position 68 is Val, Arg, Phe or Gly; the amino acid at position 69 is Glu, Ala or Lys; the amino acid at position 70 is Trp, Thr, His, Tyr or Arg; the amino acid at position 71 is Arg, Pro or deleted; the amino acid at position 72 is Trp, Asp, Leu or deleted; the amino acid at position 73 is Pro, Gln, Asn, His or deleted; the amino acid at position 74 is Pro, Met or Thr; the amino acid at position 75 is Gln, His or Arg; the amino acid at position 76 is Ile, Met or Leu; the amino acid at position 84 is Ile or Val; the amino acid at position 91 is Trp or Phe; the amino acid at position 93 is Thr or Ile; the amino acid at position 94 is Asp or Gly; the amino acid at position 96 is Arg or Ser; the amino acid at position 97 is Gln, Phe or Arg; the amino acid at position 98 is Ser or deleted; the amino acid at position 99 is Asp or Ala; the amino acid at position 100 is Thr or Ala; the amino acid at position 101 is Glu, Thr or Trp the amino acid at position 103 is His, Arg, Glu or Gln; the amino acid at position 105 is Thr or Pro; the amino acid at position 108 is Lys, Gln or Glu; the amino acid at position 109 is Leu or Val; the amino acid at position 111 is Ala or Thr; the amino acid at position 112 is Ile, Arg, Thr or deleted; the amino acid at position 113 is Gln, Ala, Gly or deleted; the amino acid at position 114 is Arg, Glu or Ile; the amino acid at position 115 is Glu or Gln; the amino acid at position 116 is Glu, Asn, Gln or Arg; the amino acid at position 117 is Asn, Val, Tyr or Phe; the amino acid at position 118 is Arg or Lys; the amino acid at position 119 is Trp or Ser; the amino acid at position 122 is Thr, Lys or Ala; the amino acid at position 124 is Ala or Thr; the amino acid at position 126 is Gly or Asp; the amino acid at position 127 is Met or Ala; the amino acid at position 128 is Asn or Lys; the amino acid at position 131 is Val, Ile or Thr; the amino acid at position 133 is Ile or Val; the amino acid at position 134 is His or Tyr; the amino acid at position 135 is Ala or Gly; the amino acid at position 137 is Glu or Lys; the amino acid at position 139 is Gln or Glu; the amino acid at position 140 is Val, Arg or Leu; the amino acid at position 141 is Gly or Ser; the amino acid at position 142 is Val or Pro; the amino acid at position 144 is Thr, Leu, Phe or Tyr; the amino acid at position 145 is Met, Pro or Asn; the amino acid at position 146 is Ser, Gly or Asn; the amino acid at position 147 is Trp or Asn; the amino acid at position 148 is Ser, Ala or Pro; the amino acid at position 149 is Ser or deleted; the amino acid at position 150 is Val, Ile or Tyr; the amino acid at position 152 is Arg, Ala, Val or Gly; the amino acid at position 154 is Ser, Trp or Glu; the amino acid at position 156 is Leu, Asp or Gln; the amino acid at position 158 is Ser or Cys; the amino acid at position 159 is Val, Thr or Ile; the amino acid at position 162 is Ser or Ala; the amino acid at position 163 is Gly or deleted; the amino acid at position 164 is Phe or deleted; the amino acid at position 165 is Arg or Ala; the amino acid at position 166 is Ala, Arg, Met or Phe; the amino acid at position 167 is Val or His; the amino acid at position 168 is Ser or Asn; the amino acid at position 169 is Val, His or Thr; the amino acid at position 170 is Phe or Val; the amino acid at position 171 is Glu, Asn or Asp; the amino acid at position 172 is Val, Ala, Arg or Glu; the amino acid at position 175 is Ser, Arg or Trp; the amino acid at position 176 is Val or Ile; the amino acid at position 177 is Arg or Ile; the amino acid at position 179 is Thr, Ile, Val or Ser; the amino acid at position 180 is Leu, Phe or Thr; the amino acid at position 181 is Gly, Thr, Gln or Ser; the amino acid at position 182 is Ala, Leu, Phe or Ile; the amino acid at position 183 is Thr or Gly; the amino acid at position 184 is Leu, Thr, Ser or Arg; the amino acid at position 185 is Arg, Gly, Asp or Ala; the amino acid at position 186 is Pro, Val or Gln; the amino acid at position 187 is Asp, Thr or Ser; the amino acid at position 188 is His, Gly or Ala; the amino acid at position 189 is Ala, Arg, Pro or deleted; the amino acid at position 190 is Leu, Asn or deleted; the amino acid at position 191 is Tyr or deleted; the amino acid at position 192 is Ser, Ile, Val or Asn; the amino acid at position 193 is Thr or Asp; the amino acid at position 194 is Thr or Ser; the amino acid at position 195 is Met or Thr; the amino acid at position 196 is Gln, His, Leu or Ser; the amino acid at position 197 is Ala, Gly or Leu; the amino acid at position 198 is Thr, Glu or Ala; the amino acid at position 199 is Pro or Arg; the amino acid at position 200 is Asn, Ser, Thr or Gly; the amino acid at position 201 is Ala, Leu, Glu or Trp; the amino acid at position 202 is Ser, Asp, Phe or Leu; the amino acid at position 203 is His, Pro, Gly or Ser; the amino acid at position 204 is Ile, Trp, His or Gly; the amino acid at position 205 is Ser, Asn or Ile; the amino acid at position 206 is Ala, Gly, Asp, Tyr or Arg; the amino acid at position 207 is Phe, Val or Leu; the amino acid at position 208 is Asn, Ser, Pro or Leu; the amino acid at position 210 is Arg, Asp, Glu or Tyr; the amino acid at position 211 is Ile, Ser or Thr; the amino acid at position 212 is Val, Ala or Asp; the amino acid at position 214 is Pro or Arg; the amino acid at position 215 is Ser or Thr; the amino acid at position 217 is Tyr or Phe; the amino acid at position 218 is Arg or Ser; the amino acid at position 219 is Val or Ala; the amino acid at position 220 is Cys, Leu or Ser; the amino acid at position 221 is Pro or His; the amino acid at position 222 is Leu, Arg or Ser; the amino acid at position 224 is Asn or Ser; the amino acid at position 225 is Asp, Arg or Thr; the amino acid at position 226 is Thr or Asn; the amino acid at position 227 is Asp, Leu or deleted; the amino acid at position 228 is Thr or deleted; the amino acid at position 229 is Tyr or deleted; the amino acid at position 230 is Leu or deleted; the amino acid at position 231 is Gly or deleted; the amino acid at position 232 is Ile or deleted; the amino acid at position 233 is Pro or deleted; the amino acid at position 234 is Ala, Pro or deleted; the amino acid at position 235 is Asp, Ile or Val; the amino acid at position 236 is Val, Ser or Glu; the amino acid at position 237 is Ala, Phe or Tyr; the amino acid at position 238 is Ala or Thr; the amino acid at position 239 is Val, Ser or Gly; the amino acid at position 240 is Leu or Ile; the amino acid at position 243 is Asp or Glu; the amino acid at position 249 is Asn or Ser; the amino acid at position 252 is Leu or Met; the amino acid at position 257 is Thr or Ser; the amino acid at position 259 is His or Leu; the amino acid at position 266 is Ala or Val; the amino acid at position 267 is Cys or Gly; the amino acid at position 268 is His, Arg or Tyr; the amino acid at position 272 is Asp or Glu; the amino acid at position 273 is Val, Met, lie or Leu; the amino acid at position 274 is Val or Met; the amino acid at position 278 is Gly or Ala; the amino acid at position 279 is Glu or Val; the amino acid at position 281 is Leu or Ala; the amino acid at position 282 is Asn, Leu or Ile; the amino acid at position 285 is Asn or Ser; the amino acid at position 286 is Lys, Asp or Glu; the amino acid at position 287 is Leu or Val; the amino acid at position 290 is Pro, Gln or Arg; the amino acid at position 291 is Leu or Val; the amino acid at position 292 is Lys or Val; the amino acid at position 293 is Glu or Gln; the amino acid at position 294 is Ser, Asn or Lys; the amino acid at position 295 is Thr or Ser; the amino acid at position 296 is Gln or His; the amino acid at position 297 is Leu or Met; the amino acid at position 300 is Ser or Thr; the amino acid at position 301 is Glu or Ala; the amino acid at position 302 is Ser, Pro or Ala; the amino acid at position 304 is Lys or Asn; the amino acid at position 313 is Val or Ile; the amino acid at position 314 is His, Glu or Gln; the amino acid at position 315 is Ala, Cys or Ser; the amino acid at position 316 is Ala or Val; the amino acid at position 317 is Met or Ile; the amino acid at position 319 is Met or Ile; the amino acid at position 320 is Val or Gly; the amino acid at position 321 is Arg or Pro; the amino acid at position 322 is Ile or Phe; the amino acid at position 323 is Gly or Val; the amino acid at position 324 is Leu or Ser; the amino acid at position 336 is Ser or Asn; the amino acid at position 339 is Asn, Lys or Arg; the amino acid at position 350 is Arg or Gln; the amino acid at position 351 is Glu or Asp; the amino acid at position 353 is Lys or Arg; the amino acid at position 354 is Gln or Arg; the amino acid at position 355 is Phe or Leu; the amino acid at position 356 is Lys or Arg; the amino acid at position 360 is Ile, Val or Ala; the amino acid at position 365 is Leu or Phe; the amino acid at position 371 is or Glu; the amino acid at position 372 is or Lys; the amino acid at position 374 is Arg or Lys; the amino acid at position 376 is Phe or Leu; the amino acid at position 378 is Glu or Asp; the amino acid at position 381 is Leu or Val; the amino acid at position 388 is Ala or Ser; the amino acid at position 395 is Arg or Lys; the amino acid at position 396 is Glu, Gln or Gly; the amino acid at position 399 is Asp or Asn; the amino acid at position 400 is Asn, Thr or Asp; the amino acid at position 401 is Thr or Ala; the amino acid at position 402 is Phe, Ile or Leu; the amino acid at position 406 is Asp or Glu; the amino acid at position 408 is Leu or Met; the amino acid at position 410 is Gly or Leu; the amino acid at position 414 is Ala or Glu; the amino acid at position 416 is Ser, Asn or Asp; the amino acid at position 417 is Ser, Arg or Gly; the amino acid at position 423 is Lys or Gln; the amino acid at position 431 is Arg or Lys; the amino acid at position 432 is Gln or Glu; the amino acid at position 436 is Arg or Glu; the amino acid at position 440 is Asn or Arg; the amino acid at position 442 is Leu or Val; the amino acid at position 447 is Ser, Lys or Arg; the amino acid at position 448 is Ala or Ser; the amino acid at position 451 is Gln or Met; the amino acid at position 453 is Gly or Ala; the amino acid at position 455 is Ala or Val; the amino acid at position 457 is Leu or Val; the amino acid at position 467 is Val or Ala; the amino acid at position 471 is Gly or Ala; the amino acid at position 475 is Ser or Asn; the amino acid at position 483 is Gly or Ala; the amino acid at position 493 is Gln or Gly; the amino acid at position 504 is Val or Ile; the amino acid at position 506 is Asp or His; the amino acid at position 509 is Asp or Asn; the amino acid at position 510 is Ser or Ala; the amino acid at position 512 is Glu or Asp; the amino acid at position 515 is Gly or Ser; the amino acid at position 516 is Gin or His; the amino acid at position 517 is Ile or Leu; the amino acid at position 519 is Asp, Gly or Gln; the amino acid at position 522 is Val, Glu, Pro or Val; the amino acid at position 525 is Glu or Asp; the amino acid at position 526 is Leu or Met; the amino acid at position 539 is Val or Ile; the amino acid at position 555 is Val or Ala; the amino acid at position 557 is Arg or Lys; the amino acid at position 563 is Val or Met; the amino acid at position 571 is Ser or Cys; the amino acid at position 575 is Val or Glu; the amino acid at position 577 is Met or Ile; the amino acid at position 579 is Glu or Gln; the amino acid at position 583 is Asp or Glu; the amino acid at position 589 is Met or Leu; the amino acid at position 590 is Met or Leu; the amino acid at position 593 is Met or Ile; the amino acid at position 595 is Arg or Gln; the amino acid at position 596 is Ser or Thr; the amino acid at position 597 is Gln or His; the amino acid at position 607 is Ala or Val; the amino acid at position 608 is Asp or Asn; the amino acid at position 612 is Tyr, His or Phe; the amino acid at position 617 is Thr or Ile; the amino acid at position 618 is Gin or His; the amino acid at position 625 is Arg or Ser; the amino acid at position 626 is Met or Ile; the amino acid at position 628 is Leu or Ile; the amino acid at position 633 is lie or Met; the amino acid at position 634 is Leu or Met; the amino acid at position 642 is Arg or Met; the amino acid at position 648 is Met or Thr; the amino acid at position 651 is Glu or Gln; the amino acid at position 654 is Thr, Val or Ala; the amino acid at position 658 is Gly or Arg; the amino acid at position 663 is Gly or Ala; the amino acid at position 664 is Asp or Asn; the amino acid at position 668 is Ala or Thr; the amino acid at position 669 is Gln or His; the amino acid at position 671 is Asn or Ser the amino acid at position 675 is Ile, Val or Ser; the amino acid at position 678 is Met, Ile, Ala or Thr; the amino acid at position 682 is Pro or Gln; the amino acid at position 683 is Ser or Pro; the amino acid at position 685 is Asp or Asn; the amino acid at position 694 is Asp or Gly; the amino acid at position 697 is Asn or Ser; the amino acid at position 704 is Glu or Gly; the amino acid at position 714 is Ala or Gly; the amino acid at position 721 is Ser or Phe; the amino acid at position 722 is Ser or Asn; the amino acid at position 724 is Ser or Thr; the amino acid at position 734 is His or Gln; the amino acid at position 736 is Val or Ala; the amino acid at position 737 is Lys or Gln; the amino acid at position 739 is Ala or Ser; the amino acid at position 740 is Ser or Met; the amino acid at position 741 is Gly or Asn; the amino acid at position 742 is Ile or Gly; the amino acid at position 743 is Gly or deleted; the amino acid at position 745 is Gly or Asp; the amino acid at position 751 is Thr, Ser or Ala; the amino acid at position 753 is Gln or Arg; the amino acid at position 754 is Thr or Ser; the amino acid at position 756 is Thr or Ile; the amino acid at position 757 is Val or Ile; the amino acid at position 766 is Ile or Val; the amino acid at position 773 is Asp or Glu; the amino acid at position 774 is Gln or Glu; the amino acid at position 776 is Leu or Met; the amino acid at position 777 is Pro or Thr; the amino acid at position 782 is Ala, Asp or Val; the amino acid at position 786 is Tyr or Phe; the amino acid at position 787 is His or Gln; the amino acid at position 788 is Tyr or Met; the amino acid at position 789 is Ala or Arg; the amino acid at position 790 is Tyr or Thr; the amino acid at position 791 is Arg or Ala; the amino acid at position 792 is Leu or Ser; the amino acid at position 796 is Asp or Glu; the amino acid at position 797 is Ser, Thr or Ala the amino acid at position 802 is Glu or Gln; the amino acid at position 806 is Gln, Asp, Glu or His; the amino acid at position 810 is Lys or Thr; the amino acid at position 819 is Arg or His; the amino acid at position 829 is Lys, Ser, Ala or Pro; the amino acid at position 832 is Ala, Lys or Glu; the amino acid at position 833 is Gly or Glu; the amino acid at position 842 is Leu or Pro; the amino acid at position 847 is Gln or Glu; the amino acid at position 848 is Ile or Val; the amino acid at position 849 is Val or Ala; the amino acid at position 855 is Thr or Met; the amino acid at position 860 is Ile or Val; and the amino acid at position 864 is His or Gln.

[0140] In some embodiments the PtIP-83 polypeptide is a variant of SEQ ID NO: 1, wherein the amino acid at position 1 is Met or deleted; the amino acid at position 2 is Ala or deleted; the amino acid at position 3 is Leu, Val, Ile or deleted; the amino acid at position 4 is Val, Met, Ile or Leu; the amino acid at position 7 is Gly, Thr or Ser; the amino acid at position 8 is Lys, Arg, Ser or Thr; the amino acid at position 10 is Phe, Trp or Tyr; the amino acid at position 11 is Glu, Asp, Lys or Arg; the amino acid at position 18 is Met, Val, Leu or Ile; the amino acid at position 19 is Gly, Pro or Ala; the amino acid at position 20 is Val, Ile, Leu or deleted; the amino acid at position 21 is Leu, Ile or Val; the amino acid at position 23 is Arg, Lys, Asn or Gln; the amino acid at position 37 is Val, Ile or Leu; the amino acid at position 38 is Arg, Lys, Gln or Asn; the amino acid at position 40 is Ala, Gly, Thr or Ser; the amino acid at position 43 is Asn, Gln, Glu or Asp; the amino acid at position 45 is Gly or Ala; the amino acid at position 46 is Gln, Asp, Asn or Glu; the amino acid at position 48 is Glu, Asp, Pro, Ile, Leu or Val; the amino acid at position 51 is Glu, Asp, Ala or Gly; the amino acid at position 52 is Lys, Arg, Ser or Thr; the amino acid at position 56 is Leu, Ile or Val; the amino acid at position 59 is Phe, Ile, Val or Leu; the amino acid at position 66 is Pro, Gly or Ala; the amino acid at position 67 is Val, Pro, Ile, Leu, Ser or Thr; the amino acid at position 68 is Val, Arg, Phe, Ile, Leu, Lys or Gly; the amino acid at position 69 is Glu, Ala, Asp, Gly, Arg or Lys; the amino acid at position 70 is Trp, Thr, His, Tyr, Lys or Arg; the amino acid at position 71 is Arg, Pro, Lys or deleted; the amino acid at position 72 is Trp, Asp, Leu, Ile, Val, Glu or deleted; the amino acid at position 73 is Pro, Gln, Asn, His or deleted; the amino acid at position 74 is Pro, Met, Ser or Thr; the amino acid at position 75 is Gln, His, Asn, Lys or Arg; the amino acid at position 76 is Ile, Met, Val or Leu; the amino acid at position 84 is Ile, Leu or Val; the amino acid at position 91 is Trp or Phe; the amino acid at position 93 is Thr, Ser, Leu, Val or Ile; the amino acid at position 94 is Asp, Glu, Ala or Gly; the amino acid at position 96 is Arg, Lys, Thr or Ser; the amino acid at position 97 is Gln, Phe, Asn, Lys or Arg; the amino acid at position 98 is Ser, Thr or deleted; the amino acid at position 99 is Asp, Glu, Gly or Ala; the amino acid at position 100 is Thr, Ser, Gly or Ala; the amino acid at position 101 is Glu, Thr, Asp, Ser or Trp the amino acid at position 103 is His, Arg, Lys, Glu or Gln; the amino acid at position 105 is Thr, Ser or Pro; the amino acid at position 108 is Lys, Arg, Asn, Asp, Gln or Glu; the amino acid at position 109 is Leu, Ile or Val; the amino acid at position 111 is Ala, Ser or Thr; the amino acid at position 112 is Ile, Arg, Thr, Leu, Val, Lys, Ser or deleted; the amino acid at position 113 is Gln, Ala, Gly, Asn or deleted; the amino acid at position 114 is Arg, Glu, Lys, Asp or Ile; the amino acid at position 115 is Glu, Asp, Asn or Gln; the amino acid at position 116 is Glu, Asn, Gln, Asp, Lys or Arg; the amino acid at position 117 is Asn, Val, Tyr, Ile, Leu, Gln, Trp or Phe; the amino acid at position 118 is Arg or Lys; the amino acid at position 119 is Trp, Thr or Ser; the amino acid at position 122 is Thr, Lys, Ser, Arg or Ala; the amino acid at position 124 is Ala, Gly, Ser or Thr; the amino acid at position 126 is Gly, Ala, Glu or Asp; the amino acid at position 127 is Met, Gly or Ala; the amino acid at position 128 is Asn, Gln, Arg or Lys; the amino acid at position 131 is Val, Ile, Leu, Ser or Thr; the amino acid at position 133 is Ile, Leu or Val; the amino acid at position 134 is His or Tyr; the amino acid at position 135 is Ala or Gly; the amino acid at position 137 is Glu, Asp, Arg or Lys; the amino acid at position 139 is Gin, Asn, Asp or Glu; the amino acid at position 140 is Val, Arg, Ile, Lys or Leu; the amino acid at position 141 is Gly, Ala, Thr or Ser; the amino acid at position 142 is Val, Ile, Leu or Pro; the amino acid at position 144 is Thr, Leu, Phe, Ile, Val or Tyr; the amino acid at position 145 is Met, Pro, Gln or Asn; the amino acid at position 146 is Ser, Gly, Thr, Ala, Gln or Asn; the amino acid at position 147 is Trp, Gln, Tyr or Asn; the amino acid at position 148 is Ser, Ala, Thr, Gly or Pro; the amino acid at position 149 is Ser, Thr or deleted; the amino acid at position 150 is Val, Ile, Leu or Tyr; the amino acid at position 152 is Arg, Ala, Val, Ile, Leu, Lys or Gly; the amino acid at position 154 is Ser, Trp, Thr, Asp or Glu; the amino acid at position 156 is Leu, Asp, Ile, Val, Asn, Glu or Gln; the amino acid at position 158 is Ser, Thr or Cys; the amino acid at position 159 is Val, Thr, Leu or Ile; the amino acid at position 162 is Ser, Thr, Gly or Ala; the amino acid at position 163 is Gly, Ala or deleted; the amino acid at position 164 is Phe or deleted; the amino acid at position 165 is Arg, Lys, Gly or Ala; the amino acid at position 166 is Ala, Arg, Met, Lys or Phe; the amino acid at position 167 is Val, Ile, Leu or His; the amino acid at position 168 is Ser, Thr, Gln or Asn; the amino acid at position 169 is Val, His, Ile, Leu, Ser or Thr; the amino acid at position 170 is Phe, Ile, Leu or Val; the amino acid at position 171 is Glu, Asn, Gln or Asp; the amino acid at position 172 is Val, Ala, Arg, Ile, Leu, Gly, Lys, Asp or Glu; the amino acid at position 175 is Ser, Arg, Thr, Lys or Trp; the amino acid at position 176 is Val, Leu or Ile; the amino acid at position 177 is Arg, Lys, Leu, Val or Ile; the amino acid at position 179 is Thr, Ile, Val, Leu or Ser; the amino acid at position 180 is Leu, Phe, Ile, Val, Ser or Thr; the amino acid at position 181 is Gly, Thr, Gln, Asn or Ser; the amino acid at position 182 is Ala, Leu, Phe, Val or Ile; the amino acid at position 183 is Thr, Ser, Ala or Gly; the amino acid at position 184 is Leu, Thr, Ser, Ile, Val, Lys or Arg; the amino acid at position 185 is Arg, Gly, Asp, Lys, Glu or Ala; the amino acid at position 186 is Pro, Val, Ile, Leu, Asn or Gln; the amino acid at position 187 is Asp, Thr, Glu or Ser; the amino acid at position 188 is His, Gly or Ala; the amino acid at position 189 is Ala, Arg, Pro, Lys, Gly or deleted; the amino acid at position 190 is Leu, Asn, Ile, Val, Gln or deleted; the amino acid at position 191 is Tyr or deleted; the amino acid at position 192 is Ser, Ile, Val, Leu, Thr or Asn; the amino acid at position 193 is Thr, Ser, Glu or Asp; the amino acid at position 194 is Thr or Ser; the amino acid at position 195 is Met or Thr; the amino acid at position 196 is Gln, His, Leu, Asn, Ile, Val, Thr or Ser; the amino acid at position 197 is Ala, Gly, Ile, Val or Leu; the amino acid at position 198 is Thr, Glu, Ser, Asp, Gly or Ala; the amino acid at position 199 is Pro, Lys or Arg; the amino acid at position 200 is Asn, Ser, Thr, Gln, Ala or Gly; the amino acid at position 201 is Ala, Leu, Glu, Ile, Asp or Trp; the amino acid at position 202 is Ser, Asp, Phe, Ile, Val, Thr, Glu or Leu; the amino acid at position 203 is His, Pro, Gly, Ala, Thr or Ser; the amino acid at position 204 is Ile, Trp, His, Leu, Val, Ala or Gly; the amino acid at position 205 is Ser, Asn, Leu, Val, Thr, Gln or Ile; the amino acid at position 206 is Ala, Gly, Asp, Tyr, Glu, Lys or Arg; the amino acid at position 207 is Phe, Val, Ile or Leu; the amino acid at position 208 is Asn, Ser, Pro, Gln, Thr, Val, Ile or Leu; the amino acid at position 210 is Arg, Asp, Glu, Lys, Ser or Tyr; the amino acid at position 211 is Ile, Ser, Leu, Val or Thr; the amino acid at position 212 is Val, Ala, Ile, Leu, Glu, Gly or Asp; the amino acid at position 214 is Pro, Lys or Arg; the amino acid at position 215 is Ser or Thr; the amino acid at position 217 is Tyr or Phe; the amino acid at position 218 is Arg, Lys, Thr or Ser; the amino acid at position 219 is Val, Ile, Leu or Ala; the amino acid at position 220 is Cys, Leu, Ile, Val, Thr or Ser; the amino acid at position 221 is Pro or His; the amino acid at position 222 is Leu, Arg, Lys, Ile, Val, Thr or Ser; the amino acid at position 224 is Asn, Gln, Thr or Ser; the amino acid at position 225 is Asp, Arg, Glu, Lys, Ser or Thr; the amino acid at position 226 is Thr, Ser, Gln or Asn; the amino acid at position 227 is Asp, Leu, Glu, Ile, Val or deleted; the amino acid at position 228 is Thr, Ser or deleted; the amino acid at position 229 is Tyr or deleted; the amino acid at position 230 is Leu, Ile, Val or deleted; the amino acid at position 231 is Gly, Ala or deleted; the amino acid at position 232 is Ile, Leu, Val or deleted; the amino acid at position 233 is Pro or deleted; the amino acid at position 234 is Ala, Pro, Gly or deleted; the amino acid at position 235 is Asp, Ile, Leu, Glu or Val; the amino acid at position 236 is Val, Ser, Ile, Leu, Thr, Asp or Glu; the amino acid at position 237 is Ala, Phe or Tyr; the amino acid at position 238 is Ala, Gly, Ser or Thr; the amino acid at position 239 is Val, Ser, Ile, Leu, Thr, Ala or Gly; the amino acid at position 240 is Leu, Val or Ile; the amino acid at position 243 is Asp or Glu; the amino acid at position 249 is Asn, Gln, Thr or Ser; the amino acid at position 252 is Leu, Ile, Val or Met; the amino acid at position 257 is Thr or Ser; the amino acid at position 259 is His, Ile, Val or Leu; the amino acid at position 266 is Ala, Ile, Leu or Val; the amino acid at position 267 is Cys, Ala or Gly; the amino acid at position 268 is His, Arg, Lys or Tyr; the amino acid at position 272 is Asp or Glu; the amino acid at position 273 is Val, Met, Ile or Leu; the amino acid at position 274 is Val, Ile, Leu or Met; the amino acid at position 278 is Gly or Ala; the amino acid at position 279 is Glu, Asp, Gly or Val; the amino acid at position 281 is Leu, Ile, Val, Gly or Ala; the amino acid at position 282 is Asn, Leu or Ile; the amino acid at position 285 is Asn, Gln, Thr or Ser; the amino acid at position 286 is Lys, Asp, Arg or Glu; the amino acid at position 287 is Leu, Ile or Val; the amino acid at position 290 is Pro, Gln, Asn, Lys or Arg; the amino acid at position 291 is Leu, Ile or Val; the amino acid at position 292 is Lys, Arg, Ile, Leu or Val; the amino acid at position 293 is Glu, Asp, Asn or Gln; the amino acid at position 294 is Ser, Asn, Thr, Gin, Arg or Lys; the amino acid at position 295 is Thr or Ser; the amino acid at position 296 is Gln, Asn or His; the amino acid at position 297 is Leu, Ile, Val or Met; the amino acid at position 300 is Ser or Thr; the amino acid at position 301 is Glu, Asp, Gly or Ala; the amino acid at position 302 is Ser, Pro, Thr, Gly or Ala; the amino acid at position 304 is Lys, Arg, Gln or Asn; the amino acid at position 313 is Val, Leu or Ile; the amino acid at position 314 is His, Glu, Asn, Asp or Gln; the amino acid at position 315 is Ala, Cys, Gly, Thr or Ser; the amino acid at position 316 is Ala, Ile, Leu or Val; the amino acid at position 317 is Met, Leu, Val or Ile; the amino acid at position 319 is Met, Leu, Val or Ile; the amino acid at position 320 is Val, Ile, Leu, Ala or Gly; the amino acid at position 321 is Arg, Lys or Pro; the amino acid at position 322 is Ile, Leu, Val or Phe; the amino acid at position 323 is Gly, Ile, Leu or Val; the amino acid at position 324 is Leu, Ile, Val, Thr or Ser; the amino acid at position 336 is Ser, Thr, Gln or Asn; the amino acid at position 339 is Asn, Lys, Gln or Arg; the amino acid at position 350 is Arg, Lys, Asn or Gln; the amino acid at position 351 is Glu or Asp; the amino acid at position 353 is Lys or Arg; the amino acid at position 354 is Gln, Asn, Lys or Arg; the amino acid at position 355 is Phe, Ile, Leu or Leu; the amino acid at position 356 is Lys or Arg; the amino acid at position 360 is Ile, Val, Leu, Gly or Ala; the amino acid at position 365 is Leu, Ile, Val or Phe; the amino acid at position 371 is or Glu or Asp; the amino acid at position 372 is or Lys or Arg; the amino acid at position 374 is Arg or Lys; the amino acid at position 376 is Phe, Ile, Val or Leu; the amino acid at position 378 is Glu or Asp; the amino acid at position 381 is Leu, Ile or Val; the amino acid at position 388 is Ala, Thr, Gly or Ser; the amino acid at position 395 is Arg or Lys; the amino acid at position 396 is Glu, Gln, Asp, Asn, Ala or Gly; the amino acid at position 399 is Asp, Gln, Glu or Asn; the amino acid at position 400 is Asn, Thr, Ser, Glu, Gln or Asp; the amino acid at position 401 is Thr, Ser, Gly or Ala; the amino acid at position 402 is Phe, Ile, Val or Leu; the amino acid at position 406 is Asp or Glu; the amino acid at position 408 is Leu, Ile, Val or Met; the amino acid at position 410 is Gly, Ile, Val, Ala or Leu; the amino acid at position 414 is Ala, Gly, Asp or Glu; the amino acid at position 416 is Ser, Asn, Thr, Gin, Glu or Asp; the amino acid at position 417 is Ser, Arg, Lys, Thr, Ala or Gly; the amino acid at position 423 is Lys, Arg, Asn or Gln; the amino acid at position 431 is Arg or Lys; the amino acid at position 432 is Gln, Asn, Asp or Glu; the amino acid at position 436 is Arg, Lys, Asp or Glu; the amino acid at position 440 is Asn, Gln, Lys or Arg; the amino acid at position 442 is Leu, Ile or Val; the amino acid at position 447 is Ser, Lys, Thr or Arg; the amino acid at position 448 is Ala, Gly, Thr or Ser; the amino acid at position 451 is Gln, Asn or Met; the amino acid at position 453 is Gly or Ala; the amino acid at position 455 is Ala, Leu, Ile or Val; the amino acid at position 457 is Leu, Ile or Val; the amino acid at position 467 is Val, Ile, Leu, Gly or Ala; the amino acid at position 471 is Gly or Ala; the amino acid at position 475 is Ser, Thr, Gln or Asn; the amino acid at position 483 is Gly or Ala; the amino acid at position 493 is Gln, Asn or Gly; the amino acid at position 504 is Val, Leu or Ile; the amino acid at position 506 is Asp, Glu or His; the amino acid at position 509 is Asp, Glu, Gln or Asn; the amino acid at position 510 is Ser, Thr, Gly or Ala; the amino acid at position 512 is Glu or Asp; the amino acid at position 515 is Gly, Ala, Thr or Ser; the amino acid at position 516 is Gln, Asn or His; the amino acid at position 517 is Ile, Val or Leu; the amino acid at position 519 is Asp, Asn, Glu, Gly or Gln; the amino acid at position 522 is Val, Glu, Pro, Ile, Leu or Asp; the amino acid at position 525 is Glu or Asp; the amino acid at position 526 is Leu, Ile, Val or Met; the amino acid at position 539 is Val, Leu or Ile; the amino acid at position 555 is Val, Leu, Ile or Ala; the amino acid at position 557 is Arg or Lys; the amino acid at position 563 is Val, Leu, Ile or Met; the amino acid at position 571 is Ser, Thr or Cys; the amino acid at position 575 is Val, Leu, Ile, Asp or Glu; the amino acid at position 577 is Met, Leu, Val or Ile; the amino acid at position 579 is Glu, Asp, Asn or Gln; the amino acid at position 583 is Asp or Glu; the amino acid at position 589 is Met, Ile, Val or Leu; the amino acid at position 590 is Met, Ile, Val or Leu; the amino acid at position 593 is Met, Leu, Val or Ile; the amino acid at position 595 is Arg, Lys, Asn or Gln; the amino acid at position 596 is Ser or Thr; the amino acid at position 597 is Gln, Asn or His; the amino acid at position 607 is Ala, Gly, Ile, Leu or Val; the amino acid at position 608 is Asp, Glu, Gln or Asn; the amino acid at position 612 is Tyr, His or Phe; the amino acid at position 617 is Thr, Ser, Leu, Val or Ile; the amino acid at position 618 is Gln, Asn or His; the amino acid at position 625 is Arg, Lys, Thr or Ser; the amino acid at position 626 is Met, Leu, Val or Ile; the amino acid at position 628 is Leu, Val or Ile; the amino acid at position 633 is Ile, Leu, Val or Met; the amino acid at position 634 is Leu, Ile, Val or Met; the amino acid at position 642 is Arg, Lys or Met; the amino acid at position 648 is Met, Ser or Thr; the amino acid at position 651 is Glu, Asp, Asn or Gln; the amino acid at position 654 is Thr, Val, Ser, Ile, Leu, Gly or Ala; the amino acid at position 658 is Gly, Lys, Ala or Arg; the amino acid at position 663 is Gly or Ala; the amino acid at position 664 is Asp, Glu, Gln or Asn; the amino acid at position 668 is Ala, Gly, Ser or Thr; the amino acid at position 669 is Gln, Asn or His; the amino acid at position 671 is Asn, Gln, Thr or Ser the amino acid at position 675 is Ile, Val, Ile, Thr or Ser; the amino acid at position 678 is Met, Ile, Ala, Leu, Ser or Thr; the amino acid at position 682 is Pro, Asn or Gln; the amino acid at position 683 is Ser, Thr or Pro; the amino acid at position 685 is Asp, Glu, Asp or Asn; the amino acid at position 694 is Asp, Glu, Ala or Gly; the amino acid at position 697 is Asn, Gln, Thr or Ser; the amino acid at position 704 is Glu, Asp, Ala or Gly; the amino acid at position 714 is Ala or Gly; the amino acid at position 721 is Ser, Thr or Phe; the amino acid at position 722 is Ser, Thr, Gln or Asn; the amino acid at position 724 is Ser or Thr; the amino acid at position 734 is His, Asn or Gln; the amino acid at position 736 is Val, Leu, Ile or Ala; the amino acid at position 737 is Lys, Arg, Asn or Gln; the amino acid at position 739 is Ala, Gly, Thr or Ser; the amino acid at position 740 is Ser, Thr or Met; the amino acid at position 741 is Gly, Ala, Gin or Asn; the amino acid at position 742 is Ile, Leu, Val, Ala or Gly; the amino acid at position 743 is Gly or deleted; the amino acid at position 745 is Gly, Ala, Glu or Asp; the amino acid at position 751 is Thr, Ser, Gly or Ala; the amino acid at position 753 is Gln, Asn, Lys or Arg; the amino acid at position 754 is Thr or Ser; the amino acid at position 756 is Thr, Ser, Leu, Val or Ile; the amino acid at position 757 is Val, Leu or Ile; the amino acid at position 766 is Ile, Leu or Val; the amino acid at position 773 is Asp or Glu; the amino acid at position 774 is Gln, Asn, Asp or Glu; the amino acid at position 776 is Leu, Ile, Val or Met; the amino acid at position 777 is Pro, Ser or Thr; the amino acid at position 782 is Ala, Asp, Glu, Ile, Leu or Val; the amino acid at position 786 is Tyr or Phe; the amino acid at position 787 is His, Asn or Gln; the amino acid at position 788 is Tyr or Met; the amino acid at position 789 is Ala, Lys or Arg; the amino acid at position 790 is Tyr or Thr; the amino acid at position 791 is Arg, Lys, Gly or Ala; the amino acid at position 792 is Leu, Ile, Val, Thr or Ser; the amino acid at position 796 is Asp or Glu; the amino acid at position 797 is Ser, Thr or Ala the amino acid at position 802 is Glu, Lys, Asp, Asn or Gln; the amino acid at position 806 is Gln, Asp, Glu, Asn or His; the amino acid at position 810 is Lys, Arg or Thr; the amino acid at position 819 is Arg, Lys or His; the amino acid at position 829 is Lys, Ser, Ala or Pro; the amino acid at position 832 is Ala, Lys, Arg, Asp or Glu; the amino acid at position 833 is Gly, Ala, Asp or Glu; the amino acid at position 842 is Leu, Ile, Val or Pro; the amino acid at position 847 is Gln, Asn, Asp or Glu; the amino acid at position 848 is Ile, Leu or Val; the amino acid at position 849 is Val, Leu, Ile, Gly or Ala; the amino acid at position 855 is Thr, Ser or Met; the amino acid at position 860 is Ile, Leu or Val; the amino acid at position 864 is His, Asn or Gln;

[0141] In some embodiments the PtIP-83 polypeptide is a variant of SEQ ID NO: 1, wherein the amino acid at position 1 is Met or deleted; the amino acid at position 2 is Ala or deleted; the amino acid at position 3 is Leu, Val, Ile or deleted; the amino acid at position 4 is Val, Met, Ile or Leu; the amino acid at position 7 is Gly, Thr or Ser; the amino acid at position 8 is Lys, Arg, Ser or Thr; the amino acid at position 10 is Phe, Trp or Tyr; the amino acid at position 11 is Glu, Asp, Lys or Arg; the amino acid at position 18 is Met, Val, Leu or Ile; the amino acid at position 19 is Gly, Pro or Ala; the amino acid at position 20 is Val, Ile, Leu or deleted; the amino acid at position 21 is Leu, Ile or Val; the amino acid at position 23 is Arg, Lys, Asn or Gln; the amino acid at position 37 is Val, Ile or Leu; the amino acid at position 38 is Arg, Lys, Gln or Asn; the amino acid at position 40 is Ala, Gly, Thr or Ser; the amino acid at position 43 is Asn, Gln, Glu or Asp; the amino acid at position 45 is Gly or Ala; the amino acid at position 46 is Gln, Asp, Asn or Glu; the amino acid at position 48 is Glu, Asp, Pro, Ile, Leu or Val; the amino acid at position 51 is Glu, Asp, Ala or Gly; the amino acid at position 52 is Lys, Arg, Ser or Thr; the amino acid at position 53 is Val, Ala, Cys or Thr; the amino acid at position 54 is Lys, Ala, Cys, Asp, Glu, Gly, His, Ile, Leu, Met, Asn, Gln, Arg, Ser or Thr; the amino acid at position 55 is Arg, Ala, Asp, Glu, Phe, Gly, His, Lys, Leu, Met, Asn, Gln, Ser, Thr, Val, Trp or Tyr; the amino acid at position 56 is Leu, Glu, Phe, Ile, Met, Thr or Val; the amino acid at position 57 is Tyr, Cys, Ile, Leu, Met, Thr or Val; the amino acid at position 58 is Val, Cys, Ile or Leu; the amino acid at position 59 is Phe, Leu, Met, Val or Tyr; the amino acid at position 60 is Ala, Cys, Gly, Ser, Thr or Val; the amino acid at position 61 is Asp, Glu, His or Ser; the amino acid at position 62 is Val, Ala, Cys, Ile, Leu or Thr; the amino acid at position 63 is Val, Ala, Cys, Ile, Leu, Met or Thr; the amino acid at position 64 is Glu, Ala, Cys, Phe, Gly, His, Ile, Leu, Met, Asn, Gln, Arg, Ser, Thr, Val, Trp or Tyr; the amino acid at position 65 is Leu, Ala, Cys, Phe, His, Ile, Met, Asn, Gin, Thr, Val or Trp; the amino acid at position 66 is Pro, Asp, Gly, Met, Gln or Arg; the amino acid at position 67 is Val, Pro, Ile, Leu, Ser or Thr; the amino acid at position 68 is Val, Arg, Phe, Ile, Leu, Lys or Gly; the amino acid at position 69 is Glu, Ala, Asp, Gly, Arg or Lys; the amino acid at position 70 is Trp, Thr, His, Tyr, Lys or Arg; the amino acid at position 71 is Arg, Pro, Lys or deleted; the amino acid at position 72 is Trp, Asp, Leu, Ile, Val, Glu or deleted; the amino acid at position 73 is Pro, Gln, Asn, His or deleted; the amino acid at position 74 is Pro, Met, Ser or Thr; the amino acid at position 75 is Gin, His, Asn, Lys or Arg; the amino acid at position 76 is Ile, Met, Val or Leu; the amino acid at position 84 is Ile, Leu or Val; the amino acid at position 91 is Trp or Phe; the amino acid at position 93 is Thr, Ser, Leu, Val or Ile; the amino acid at position 94 is Asp, Glu, Ala or Gly; the amino acid at position 96 is Arg, Lys, Thr or Ser; the amino acid at position 97 is Gln, Phe, Asn, Lys or Arg; the amino acid at position 98 is Ser, Thr or deleted; the amino acid at position 99 is Asp, Glu, Gly or Ala; the amino acid at position 100 is Thr, Ser, Gly or Ala; the amino acid at position 101 is Glu, Thr, Asp, Ser or Trp the amino acid at position 103 is His, Arg, Lys, Glu or Gln; the amino acid at position 105 is Thr, Ser or Pro; the amino acid at position 108 is Lys, Arg, Asn, Asp, Gln or Glu; the amino acid at position 109 is Leu, Ile or Val; the amino acid at position 111 is Ala, Ser or Thr; the amino acid at position 112 is Ile, Arg, Thr, Leu, Val, Lys, Ser or deleted; the amino acid at position 113 is Gln, Ala, Gly, Asn or deleted; the amino acid at position 114 is Arg, Glu, Lys, Asp or Ile; the amino acid at position 115 is Glu, Asp, Asn or Gln; the amino acid at position 116 is Glu, Asn, Gln, Asp, Lys or Arg; the amino acid at position 117 is Asn, Val, Tyr, Ile, Leu, Gln, Trp or Phe; the amino acid at position 118 is Arg or Lys; the amino acid at position 119 is Trp, Thr or Ser; the amino acid at position 122 is Thr, Lys, Ser, Arg or Ala; the amino acid at position 124 is Ala, Gly, Ser or Thr; the amino acid at position 126 is Gly, Ala, Glu or Asp; the amino acid at position 127 is Met, Gly or Ala; the amino acid at position 128 is Asn, Gln, Arg or Lys; the amino acid at position 131 is Val, Ile, Leu, Ser or Thr; the amino acid at position 133 is Ile, Leu or Val; the amino acid at position 134 is His or Tyr; the amino acid at position 135 is Ala or Gly; the amino acid at position 137 is Glu, Asp, Arg or Lys; the amino acid at position 139 is Gln, Asn, Asp or Glu; the amino acid at position 140 is Val, Arg, Ile, Lys or Leu; the amino acid at position 141 is Gly, Ala, Thr or Ser; the amino acid at position 142 is Val, Ile, Leu or Pro; the amino acid at position 144 is Thr, Leu, Phe, Ile, Val or Tyr; the amino acid at position 145 is Met, Pro, Gln or Asn; the amino acid at position 146 is Ser, Gly, Thr, Ala, Gln or Asn; the amino acid at position 147 is Trp, Gln, Tyr or Asn; the amino acid at position 148 is Ser, Ala, Thr, Gly or Pro; the amino acid at position 149 is Ser, Thr or deleted; the amino acid at position 150 is Val, Ile, Leu or Tyr; the amino acid at position 152 is Arg, Ala, Val, Ile, Leu, Lys or Gly; the amino acid at position 154 is Ser, Trp, Thr, Asp or Glu; the amino acid at position 156 is Leu, Asp, Ile, Val, Asn, Glu or Gln; the amino acid at position 158 is Ser, Thr or Cys; the amino acid at position 159 is Val, Thr, Leu or Ile; the amino acid at position 162 is Ser, Thr, Gly or Ala; the amino acid at position 163 is Gly, Ala or deleted; the amino acid at position 164 is Phe or deleted; the amino acid at position 165 is Arg, Lys, Gly or Ala; the amino acid at position 166 is Ala, Arg, Met, Lys or Phe; the amino acid at position 167 is Val, Ile, Leu or His; the amino acid at position 168 is Ser, Thr, Gln or Asn; the amino acid at position 169 is Val, His, Ile, Leu, Ser or Thr; the amino acid at position 170 is Phe, Ile, Leu or Val; the amino acid at position 171 is Glu, Asn, Gln or Asp; the amino acid at position 172 is Val, Ala, Arg, Ile, Leu, Gly, Lys, Asp or Glu; the amino acid at position 175 is Ser, Arg, Thr, Lys or Trp; the amino acid at position 176 is Val, Leu or Ile; the amino acid at position 177 is Arg, Lys, Leu, Val or Ile; the amino acid at position 179 is Thr, Ile, Val, Leu or Ser; the amino acid at position 180 is Leu, Phe, Ile, Val, Ser or Thr; the amino acid at position 181 is Gly, Thr, Gln, Asn or Ser; the amino acid at position 182 is Ala, Leu, Phe, Val or Ile; the amino acid at position 183 is Thr, Ser, Ala or Gly; the amino acid at position 184 is Leu, Thr, Ser, Ile, Val, Lys or Arg; the amino acid at position 185 is Arg, Gly, Asp, Lys, Glu or Ala; the amino acid at position 186 is Pro, Val, Ile, Leu, Asn or Gln; the amino acid at position 187 is Asp, Thr, Glu or Ser; the amino acid at position 188 is His, Gly or Ala; the amino acid at position 189 is Ala, Arg, Pro, Lys, Gly or deleted; the amino acid at position 190 is Leu, Asn, Ile, Val, Gln or deleted; the amino acid at position 191 is Tyr or deleted; the amino acid at position 192 is Ser, Ile, Val, Leu, Thr or Asn; the amino acid at position 193 is Thr, Ser, Glu or Asp; the amino acid at position 194 is Thr or Ser; the amino acid at position 195 is Met or Thr; the amino acid at position 196 is Gln, His, Leu, Asn, Ile, Val, Thr or Ser; the amino acid at position 197 is Ala, Gly, Ile, Val or Leu; the amino acid at position 198 is Thr, Glu, Ser, Asp, Gly or Ala; the amino acid at position 199 is Pro, Lys or Arg; the amino acid at position 200 is Asn, Ser, Thr, Gln, Ala or Gly; the amino acid at position 201 is Ala, Leu, Glu, Ile, Asp or Trp; the amino acid at position 202 is Ser, Asp, Phe, Ile, Val, Thr, Glu or Leu; the amino acid at position 203 is His, Pro, Gly, Ala, Thr or Ser; the amino acid at position 204 is Ile, Trp, His, Leu, Val, Ala or Gly; the amino acid at position 205 is Ser, Asn, Leu, Val, Thr, Gln or Ile; the amino acid at position 206 is Ala, Gly, Asp, Tyr, Glu, Lys or Arg; the amino acid at position 207 is Phe, Val, Ile or Leu; the amino acid at position 208 is Asn, Ser, Pro, Gln, Thr, Val, Ile or Leu; the amino acid at position 210 is Arg, Asp, Glu, Lys, Ser or Tyr; the amino acid at position 211 is Ile, Ser, Leu, Val or Thr; the amino acid at position 212 is Val, Ala, Ile, Leu, Glu, Gly or Asp; the amino acid at position 214 is Pro, Lys or Arg; the amino acid at position 215 is Ser or Thr; the amino acid at position 217 is Tyr or Phe; the amino acid at position 218 is Arg, Lys, Thr or Ser; the amino acid at position 219 is Val, Ile, Leu or Ala; the amino acid at position 220 is Cys, Leu, Ile, Val, Thr or Ser; the amino acid at position 221 is Pro or His; the amino acid at position 222 is Leu, Arg, Lys, Ile, Val, Thr or Ser; the amino acid at position 224 is Asn, Gln, Thr or Ser; the amino acid at position 225 is Asp, Arg, Glu, Lys, Ser or Thr; the amino acid at position 226 is Thr, Ser, Gln or Asn; the amino acid at position 227 is Asp, Leu, Glu, Ile, Val or deleted; the amino acid at position 228 is Thr, Ser or deleted; the amino acid at position 229 is Tyr or deleted; the amino acid at position 230 is Leu, Ile, Val or deleted; the amino acid at position 231 is Gly, Ala or deleted; the amino acid at position 232 is Ile, Leu, Val or deleted; the amino acid at position 233 is Pro or deleted; the amino acid at position 234 is Ala, Pro, Gly or deleted; the amino acid at position 235 is Asp, Ile, Leu, Glu or Val; the amino acid at position 236 is Val, Ser, Ile, Leu, Thr, Asp or Glu; the amino acid at position 237 is Ala, Phe or Tyr; the amino acid at position 238 is Ala, Gly, Ser or Thr; the amino acid at position 239 is Val, Ser, Ile, Leu, Thr, Ala or Gly; the amino acid at position 240 is Leu, Val or Ile; the amino acid at position 243 is Asp or Glu; the amino acid at position 249 is Asn, Gln, Thr or Ser; the amino acid at position 252 is Leu, Ile, Val or Met; the amino acid at position 257 is Thr or Ser; the amino acid at position 259 is His, Ile, Val or Leu; the amino acid at position 266 is Ala, Ile, Leu or Val; the amino acid at position 267 is Cys, Ala or Gly; the amino acid at position 268 is His, Arg, Lys or Tyr; the amino acid at position 272 is Asp or Glu; the amino acid at position 273 is Val, Met, Ile or Leu; the amino acid at position 274 is Val, Ile, Leu or Met; the amino acid at position 278 is Gly or Ala; the amino acid at position 279 is Glu, Asp, Gly or Val; the amino acid at position 281 is Leu, Ile, Val, Gly or Ala; the amino acid at position 282 is Asn, Leu or Ile; the amino acid at position 285 is Asn, Gln, Thr or Ser; the amino acid at position 286 is Lys, Asp, Arg or Glu; the amino acid at position 287 is Leu, Ile or Val; the amino acid at position 290 is Pro, Gln, Asn, Lys or Arg; the amino acid at position 291 is Leu, Ile or Val; the amino acid at position 292 is Lys, Arg, Ile, Leu or Val; the amino acid at position 293 is Glu, Asp, Asn or Gln; the amino acid at position 294 is Ser, Asn, Thr, Gln, Arg or Lys; the amino acid at position 295 is Thr or Ser; the amino acid at position 296 is Gln, Asn or His; the amino acid at position 297 is Leu, Ile, Val or Met; the amino acid at position 300 is Ser or Thr; the amino acid at position 301 is Glu, Asp, Gly or Ala; the amino acid at position 302 is Ser, Pro, Thr, Gly or Ala; the amino acid at position 304 is Lys, Arg, Gln or Asn; the amino acid at position 313 is Val, Leu or Ile; the amino acid at position 314 is His, Glu, Asn, Asp or Gln; the amino acid at position 315 is Ala, Cys, Gly, Thr or Ser; the amino acid at position 316 is Ala, Ile, Leu or Val; the amino acid at position 317 is Met, Leu, Val or Ile; the amino acid at position 319 is Met, Leu, Val or Ile; the amino acid at position 320 is Val, Ile, Leu, Ala or Gly; the amino acid at position 321 is Arg, Lys or Pro; the amino acid at position 322 is Ile, Leu, Val or Phe; the amino acid at position 323 is Gly, Ile, Leu or Val; the amino acid at position 324 is Leu, Ile, Val, Thr or Ser; the amino acid at position 336 is Ser, Thr, Gln or Asn; the amino acid at position 339 is Asn, Lys, Gln or Arg; the amino acid at position 350 is Arg, Lys, Asn or Gln; the amino acid at position 351 is Glu or Asp; the amino acid at position 353 is Lys or Arg; the amino acid at position 354 is Gln, Asn, Lys or Arg; the amino acid at position 355 is Phe, Ile, Leu or Leu; the amino acid at position 356 is Lys or Arg; the amino acid at position 360 is Ile, Val, Leu, Gly or Ala; the amino acid at position 363 is Gin, Ala, Cys, Glu, Phe, Gly, His, Lys, Leu, Asn, Arg, Ser, Thr, Val or Trp; the amino acid at position 364 is Ile, Ala, Cys, Glu, Phe, His, Lys, Leu, Met, Asn, Gln, Ser, Thr, Val, Trp or Tyr; the amino acid at position 365 is Leu, Ala, Glu, Phe, Gly, His, Ile, Lys, Met, Asn, Arg, Val, Trp or Tyr; the amino acid at position 366 is Gly, Ala, Cys, Phe, His, Ile, Lys, Leu, Met, Asn, Ser, Thr or Val; the amino acid at position 367 is Ser, Ala, Cys, Asp, Glu, Phe, Gly, His, Ile, Leu, Met, Asn, Pro, Gln, Arg, Thr, Val or Trp; the amino acid at position 368 is Tyr, Ala, Cys, Asp, Glu, Phe, Gly, His, Ile, Lys, Leu, Met, Asn, Pro, Gin, Arg, Ser, Thr, Val or Trp; the amino acid at position 369 is Leu, Ala, Cys, Asp, Phe, Gly, Ile, Met, Thr or Val; the amino acid at position 370 is Leu, Ala, Cys, Asp, Glu, Phe, Gly, His, Ile, Lys, Met, Gln, Arg, Ser, Thr, Val, Trp or Tyr; the amino acid at position 371 is Gln, Ala, Cys, Asp, Glu, Phe, Gly, Ile, Lys, Leu, Asn, Arg, Ser, Thr, Val or Trp; the amino acid at position 372 is Gln, Ala, Cys, Asp, Phe, Gly, His, Ile, Leu, Asn, Arg, Ser, Val or Tyr; the amino acid at position 373 is Asn, Ala, Cys, Asp, Phe, Gly, His, Ile, Lys, Gin, Ser, Thr, Val or Trp; the amino acid at position 374 is Arg or Lys; the amino acid at position 376 is Phe, Ile, Val or Leu; the amino acid at position 378 is Glu or Asp; the amino acid at position 381 is Leu, Ile or Val; the amino acid at position 388 is Ala, Thr, Gly or Ser; the amino acid at position 395 is Arg or Lys; the amino acid at position 396 is Glu, Gln, Asp, Asn, Ala or Gly; the amino acid at position 399 is Asp, Gln, Glu or Asn; the amino acid at position 400 is Asn, Thr, Ser, Glu, Gln or Asp; the amino acid at position 401 is Thr, Ser, Gly or Ala; the amino acid at position 402 is Phe, Ile, Val or Leu; the amino acid at position 406 is Asp or Glu; the amino acid at position 408 is Leu, Ile, Val or Met; the amino acid at position 410 is Gly, Ile, Val, Ala or Leu; the amino acid at position 414 is Ala, Gly, Asp or Glu; the amino acid at position 416 is Ser, Asn, Thr, Gin, Glu or Asp; the amino acid at position 417 is Ser, Arg, Lys, Thr, Ala or Gly; the amino acid at position 423 is Lys, Arg, Asn or Gln; the amino acid at position 431 is Arg or Lys; the amino acid at position 432 is Gln, Asn, Asp or Glu; the amino acid at position 436 is Arg, Lys, Asp or Glu; the amino acid at position 440 is Asn, Gln, Lys or Arg; the amino acid at position 442 is Leu, Ile or Val; the amino acid at position 447 is Ser, Lys, Thr or Arg; the amino acid at position 448 is Ala, Gly, Thr or Ser; the amino acid at position 451 is Gln, Asn or Met; the amino acid at position 453 is Gly or Ala; the amino acid at position 455 is Ala, Leu, Ile or Val; the amino acid at position 457 is Leu, Ile or Val; the amino acid at position 467 is Val, Ile, Leu, Gly or Ala; the amino acid at position 471 is Gly or Ala; the amino acid at position 475 is Ser, Thr, Gln or Asn; the amino acid at position 483 is Gly or Ala; the amino acid at position 493 is Gln, Asn or Gly; the amino acid at position 504 is Val, Leu or Ile; the amino acid at position 506 is Asp, Glu or His; the amino acid at position 509 is Asp, Glu, Gln or Asn; the amino acid at position 510 is Ser, Thr, Gly or Ala; the amino acid at position 512 is Glu or Asp; the amino acid at position 515 is Gly, Ala, Thr or Ser; the amino acid at position 516 is Gln, Asn or His; the amino acid at position 517 is Ile, Val or Leu; the amino acid at position 519 is Asp, Asn, Glu, Gly or Gln; the amino acid at position 522 is Val, Glu, Pro, Ile, Leu or Asp; the amino acid at position 525 is Glu or Asp; the amino acid at position 526 is Leu, Ile, Val or Met; the amino acid at position 539 is Val, Leu or Ile; the amino acid at position 555 is Val, Leu, Ile or Ala; the amino acid at position 556 is Trp, Phe, Thr or Tyr; the amino acid at position 557 is Arg, Cys, Asp, Gly, His, Ile, Lys, Leu, Met, Asn, Pro, Gln, Ser, Thr, Val, Trp or Tyr; the amino acid at position 558 is Ala, Cys, Asp, Phe, Gly, His, Ile, Lys, Leu, Asn, Pro, Gln, Arg, Ser, Val, Trp or Tyr; the amino acid at position 559 is Lys, Ala, Cys, Phe, Gly, His, Ile, Leu, Asn, Gln, Arg, Ser, Thr, Val or Tyr; the amino acid at position 560 is Cys, Ala, Phe, Gly, Ile, Met, Asn, Arg, Ser, Thr or Val; the amino acid at position 561 is Lys, Ala, Cys, Asp, Glu, Phe, Gly, His, Ile, Leu, Met, Asn, Arg, Ser, Thr, Val or Tyr; the amino acid at position 562 is Asn, Cys, Asp, Glu, Gly, His, Leu, Met, Arg, Ser, Thr, Val or Tyr; the amino acid at position 563 is Val, Ala, Cys, Asp, Phe, His, Ile, Leu, Met, Asn, Gln, Thr or Trp; the amino acid at position 564 is Ala, Cys, Gly, Met, Gln, Ser, Thr, Val, Trp or Tyr; the amino acid at position 571 is Ser, Thr or Cys; the amino acid at position 575 is Val, Leu, Ile, Asp or Glu; the amino acid at position 577 is Met, Leu, Val or Ile; the amino acid at position 579 is Glu, Asp, Asn or Gln; the amino acid at position 583 is Asp or Glu; the amino acid at position 589 is Met, Ile, Val or Leu; the amino acid at position 590 is Met, Ile, Val or Leu; the amino acid at position 593 is Met, Leu, Val or Ile; the amino acid at position 595 is Arg, Lys, Asn or Gln; the amino acid at position 596 is Ser or Thr; the amino acid at position 597 is Gln, Asn or His; the amino acid at position 607 is Ala, Gly, Ile, Leu or Val; the amino acid at position 608 is Asp, Glu, Gln or Asn; the amino acid at position 612 is Tyr, His or Phe; the amino acid at position 617 is Thr, Ser, Leu, Val or Ile; the amino acid at position 618 is Gln, Asn or His; the amino acid at position 625 is Arg, Lys, Thr or Ser; the amino acid at position 626 is Met, Leu, Val or Ile; the amino acid at position 628 is Leu, Val or Ile; the amino acid at position 633 is Ile, Leu, Val or Met; the amino acid at position 634 is Leu, Ile, Val or Met; the amino acid at position 642 is Arg, Lys or Met; the amino acid at position 646 is Leu, Ala, Cys, Gly, Ile, Met, Asn, Gln, Ser, Thr or Val; the amino acid at position 647 is Leu, Asp, Gly, Met, Asn, Gln or Thr; the amino acid at position 648 is Met, Ala, Cys, Asp, Glu, Phe, Gly, His, Lys, Leu, Asn, Pro, Gln, Arg, Ser, Thr, Val, Trp or Tyr; the amino acid at position 649 is Pro, Ala, Cys, Asp, Glu, Phe, Gly, His, Lys, Met, Asn, Gln, Arg, Ser, Thr, Trp or Tyr; the amino acid at position 650 is Thr, Ala, Cys, Asp, Phe, Gly, His, Ile, Lys, Leu, Met, Pro, Gln, Arg, Ser, Val or Tyr; the amino acid at position 651 is Glu, Ala, Cys, Asp, Gly, His, Ile, Leu, Met, Asn, Pro, Gln, Arg, Ser, Thr, Val or Tyr; the amino acid at position 652 is Leu, Cys, Phe, Ile, Lys, Met, Pro, Arg, Ser, Thr or Val; the amino acid at position 653 is Thr, Cys, Asp, Glu, Phe, Gly, His, Ile, Lys, Leu, Pro, Arg, Ser, Val or Trp; the amino acid at position 654 is Thr, Ala, Cys, Phe, Ile, Lys, Leu, Met, Pro, Arg, Ser, Val, Trp or Tyr; the amino acid at position 655 is Trp, Phe or Tyr; the amino acid at position 658 is Gly, Lys, Ala or Arg; the amino acid at position 663 is Gly or Ala; the amino acid at position 664 is Asp, Glu, Gln or Asn; the amino acid at position 668 is Ala, Gly, Ser or Thr; the amino acid at position 669 is Gln, Asn or His; the amino acid at position 671 is Asn, Gln, Thr or Ser the amino acid at position 675 is Ile, Val, Ile, Thr or Ser; the amino acid at position 678 is Met, Ile, Ala, Leu, Ser or Thr; the amino acid at position 682 is Pro, Asn or Gln; the amino acid at position 683 is Ser, Thr or Pro; the amino acid at position 685 is Asp, Glu, Asp or Asn; the amino acid at position 694 is Asp, Glu, Ala or Gly; the amino acid at position 697 is Asn, Gln, Thr or Ser; the amino acid at position 704 is Glu, Asp, Ala or Gly; the amino acid at position 714 is Ala or Gly; the amino acid at position 721 is Ser, Thr or Phe; the amino acid at position 722 is Ser, Thr, Gln or Asn; the amino acid at position 724 is Ser or Thr; the amino acid at position 734 is His, Asn or Gln; the amino acid at position 736 is Val, Leu, Ile or Ala; the amino acid at position 737 is Lys, Arg, Asn or Gln; the amino acid at position 739 is Ala, Gly, Thr or Ser; the amino acid at position 740 is Ser, Thr or Met; the amino acid at position 741 is Gly, Ala, Gln or Asn; the amino acid at position 742 is Ile, Leu, Val, Ala or Gly; the amino acid at position 743 is Gly or deleted; the amino acid at position 745 is Gly, Ala, Glu or Asp; the amino acid at position 751 is Thr, Ser, Gly or Ala; the amino acid at position 753 is Gln, Asn, Lys or Arg; the amino acid at position 754 is Thr or Ser; the amino acid at position 756 is Thr, Ser, Leu, Val or Ile; the amino acid at position 757 is Val, Leu or Ile; the amino acid at position 766 is Ile, Leu or Val; the amino acid at position 771 is Arg, Ala, Asp, Glu, Phe, Gly, His, Ile, Lys, Leu, Asn, Ser, Thr, Val, Trp or Tyr; the amino acid at position 772 is Arg, Ala, Cys, Asp, Glu, Phe, Gly, His, Ile, Lys, Leu, Met, Pro, Gln, Ser, Thr, Val, Trp or Tyr; the amino acid at position 773 is Asp, Ala, Glu, Phe, Gly, His, Ile, Lys, Leu, Met, Asn, Gln, Arg, Ser, Thr, Val, Trp or Tyr; the amino acid at position 774 is Gln, Ala, Asp, Gly, His, Ile, Lys, Leu, Met, Asn, Pro, Arg, Ser, Thr, Val, Trp or Tyr; the amino acid at position 775 is Val, Ala, Cys, Asp, Glu, Gly, His, Ile, Asn, Pro, Gln, Arg, Ser, Thr or Tyr; the amino acid at position 776 is Leu, Ala, Cys, Asp, Glu, Phe, Gly, His, Ile, Lys, Asn, Pro, Gln, Arg, Ser, Thr, Val or Tyr; the amino acid at position 777 is Pro, Ala, Cys, Asp, Glu, Phe, Gly, His, Lys, Leu, Met, Asn, Gln, Ser, Thr, Val, Trp or Tyr; the amino acid at position 778 is Phe, Ala, His, Ile, Leu, Met, Asn, Gln, Ser, Val, Trp or Tyr; the amino acid at position 779 is Gln, Ala, Cys, Asp, Glu, Gly, His, Lys, Leu, Asn, Pro, Arg, Ser, Thr or Val; the amino acid at position 780 is Ala, Cys, Asn, Pro, Gln or Ser; the amino acid at position 781 is Ala, Cys, Asp, Glu, Phe, Gly, His, Ile, Asn, Gln, Arg, Ser, Thr, Val, Trp or Tyr; the amino acid at position 782 is Ala, Cys, Asp, Glu, Phe, Gly, His, Ile, Lys, Met, Pro, Gln, Arg, Ser, Thr, Val, Trp or Tyr; the amino acid at position 783 is Pro, Ala, Cys, Asp, Glu, Gly, His, Asn, Gln, Arg, Ser, Thr or Val; the amino acid at position 784 is Leu, Ala, Glu, Phe, His, Ile, Lys, Met, Asn, Pro, Gln, Ser, Thr, Val or Trp; the amino acid at position 785 is Asn, Ala, Cys, Glu, Phe, Gly, His, Ile, Lys, Leu, Met, Gln, Arg, Ser, Thr, Val, Trp or Tyr; the amino acid at position 786 is Tyr, Phe, Ile, Leu or Trp; the amino acid at position 787 is His, Asn or Gln; the amino acid at position 788 is Tyr or Met; the amino acid at position 789 is Ala, Lys or Arg; the amino acid at position 790 is Tyr or Thr; the amino acid at position 791 is Arg, Lys, Gly or Ala; the amino acid at position 792 is Leu, Ile, Val, Thr or Ser; the amino acid at position 796 is Asp or Glu; the amino acid at position 797 is Ser, Thr or Ala the amino acid at position 802 is Glu, Lys, Asp, Asn or Gln; the amino acid at position 806 is Gln, Asp, Glu, Asn or His; the amino acid at position 810 is Lys, Arg or Thr; the amino acid at position 819 is Arg, Lys or His; the amino acid at position 829 is Lys, Ser, Ala or Pro; the amino acid at position 832 is Ala, Lys, Arg, Asp or Glu; the amino acid at position 833 is Gly, Ala, Asp or Glu; the amino acid at position 842 is Leu, Ile, Val or Pro; the amino acid at position 847 is Gln, Asn, Asp or Glu; the amino acid at position 848 is Ile, Leu or Val; the amino acid at position 849 is Val, Leu, Ile, Gly or Ala; the amino acid at position 855 is Thr, Ser or Met; the amino acid at position 860 is Ile, Leu or Val; and the amino acid at position 864 is His, Asn or Gln.

[0142] In some embodiments the nucleic acid molecule encoding the PtIP-83 polypeptide is derived from a fern species in the Division Pteridophyta. In some embodiments the PtIP-83 polypeptide is derived from a fern species in the Class Psilotopsida. In some embodiments the PtIP-83 polypeptide is derived from a fern species in the Class Psilotopsida, Order Psilotales. In some embodiments the PtIP-83 polypeptide is derived from a fern species in the Class Psilotopsida, Order Ophioglossales. In some embodiments the PtIP-83 polypeptide is derived from a fern species in the Class Psilotopsida, Order Ophioglossales, Family Psilotaceae. In some embodiments the PtIP-83 polypeptide is derived from a fern species in the Class Psilotopsida, Order Ophioglossales Family Ophioglossaceae. In some embodiments the PtIP-83 polypeptide is derived from a fern species in the Genus Ophioglossum L., Botrychium, Botrypus, Helminthostachys, Ophioderma, Cheiroglossa, Sceptridium or Mankyua. In some embodiments the PtIP-83 polypeptide is derived from a species in the Class Polypodiopsida/Pteridopsida. In some embodiments the PtIP-83 polypeptide is derived from a fern species in the Order Osmundales (royal ferns); Family Osmundaceae. In some embodiments the PtIP-83 polypeptide is derived from a fern species in the Order Hymenophyllales; Family Hymenophyllaceae. In some embodiments the PtIP-83 polypeptide is derived from a fern species in the Order Gleicheniales; Family Gleicheniaceae, Family Dipteridaceae or Family Matoniaceae. In some embodiments the PtIP-83 polypeptide is derived from a fem species in the Order Schizaeales; Family Lygodiaceae, Family Anemiaceae or Family Schizaeaceae. In some embodiments the PtIP-83 polypeptide is derived from a fern species in the Order Schizaeales; Family Schizaeaceae, Genus Lygodium selected from but not limited to Lygodium articulatum, Lygodium circinatum, Lygodium conforme, Lygodium cubense, Lygodium digitatum, Lygodium flexuosum, Lygodium heterodoxum, Lygodium japonicum, Lygodium kerstenii, Lygodium lanceolatum, Lygodium longifolium, Lygodium merrilii, Lygodium micans, Lygodium microphyllum, Lygodium microstachyum, Lygodium oligostachyum, Lygodium palmatum, Lygodium polystachyum, Lygodium radiatum, Lygodium reticulatum, Lygodium salicifolium, Lygodium scandens, Lygodium smithianum, Lygodium subareolatum, Lygodium trifurcatum, Lygodium venustum, Lygodium versteeghii, Lygodium volubile, and Lygodium yunnanense.

[0143] In some embodiments the PtIP-83 polypeptide is derived from a fem species in the Order Salviniales; Family Marsileaceae or Family Salviniaceae. In some embodiments the PtIP-83 polypeptide is derived from a fem species in the Order Cyatheales; Family Thyrsopteridaceae, Family Loxsomataceae, Family Culcitaceae, Family Plagiogyriaceae, Family Cibotiaceae, Family Cyatheaceae, Family Dicksoniaceae or Family Metaxyaceae.

[0144] In some embodiments the PtIP-83 polypeptide is derived from a fem species in the Order Polypodiales; Family Lindsaeaceae, Family Saccolomataceae, Family Cystodiaceae, Family Dennstaedtiaceae, Family Pteridaceae, Family Aspleniaceae, Family Thelypteridaceae, Family Woodsiaceae, Family Onocleaceae, Family Blechnaceae, Family Dryopteridaceae, Family Lomariopsidaceae, Family Tectariaceae, Family Oleandraceae, Family Davalliaceae or Family Polypodiaceae.

[0145] In some embodiments the PtIP-83 polypeptide is derived from a fem species in the Order Polypodiales, Family Pteridaceae, Genus Adiantaceae selected from but not limited to Adiantum aethiopicum, Adiantum aleuticum, Adiantum bonatianum, Adiantum cajennense, Adiantum capillus-junonis, Adiantum capillus-veneris, Adiantum caudatum, Adiantum chienii, Adiantum chilense, Adiantum cuneatum, Adiantum cunninghamii, Adiantum davidii, Adiantum diaphanum, Adiantum edentulum, Adiantum edgeworthii, Adiantum excisum, Adiantum fengianum, Adiantum fimbriatum, Adiantum flabellulatum, Adiantum formosanum, Adiantum formosum, Adiantum fulvum, Adiantum gravesii, Adiantum hispidulum, Adiantum induratum, Adiantum jordanii, Adiantum juxtapositum, Adiantum latifolium, Adiantum leveillei, Adiantum lianxianense, Adiantum malesianum, Adiantum mariesii, Adiantum monochlamys, Adiantum myriosorum, Adiantum obliquum, Adiantum ogasawarense, Adiantum pedatum, Adiantum pentadactylon, Adiantum peruvianum, Adiantum philippense, Adiantum princeps, Adiantum pubescens, Adiantum raddianum, Adiantum reniforme, Adiantum roborowskii, Adiantum serratodentatum, Adiantum sinicum, Adiantum soboliferum, Adiantum subcordatum, Adiantum tenerum, Adiantum terminatum, Adiantum tetraphyllum, Adiantum trapeziforme, Adiantum venustum, Adiantum viridescens, and Adiantum viridimontanum.

[0146] In some embodiments the PtIP-83 polypeptide is derived from a fem species in the Order Polypodiales, Family Aspleniaceae, Genus Asplenium.

[0147] In some embodiments the PtIP-83 polypeptide is derived from a fern species in the Order Polypodiales, Family Aspleniaceae, Genus Aspleniuml selected from but not limited to Asplenium adiantum, Asplenium adulterinum, Asplenium aequibasis, Asplenium aethiopicum, Asplenium africanum, Asplenium x altemifolium, Asplenium angustum, Asplenium antiquum, Asplenium ascensionis, Asplenium attenuatum, Asplenium aureum, Asplenium auritum, Asplenium australasicum, Asplenium azoricum, Asplenium bifrons, Asplenium billottii, Asplenium bipinnatifidum, Asplenium brachycarpum, Asplenium bradleyi, Asplenium bulbiferum, Asplenium caudatum, Asplenium ceterach, Asplenium compressum, Asplenium congestum, Asplenium corderoanum, Asplenium crinicaule, Asplenium cristatum, Asplenium cuneifolium, Asplenium cymbifolium, Asplenium daghestanicum, Asplenium dalhousiae, Asplenium dareoides, Asplenium daucifolium, Asplenium difforme, Asplenium fissum, Asplenium dimorphum, Asplenium divaricatum, Asplenium dregeanum, Asplenium x ebenoides, Asplenium ecuadorense, Asplenium feei Kunze, Asplenium fissum, Asplenium flabellifolium, Asplenium flaccidum, Asplenium fontanum, Asplenium forisiense, Asplenium formosum, Asplenium gemmiferum, Asplenium x germanicum, Asplenium gueinzii, Asplenium goudeyi, Asplenium hemionitis, Asplenium hermannii-christii, Asplenium hookerianum, Asplenium hybridum, Asplenium incisum, Asplenium x jacksonii, Asplenium x kenzoi, Asplenium laciniatum, Asplenium lamprophyllum, Asplenium laserpitiifolium, Asplenium lepidum, Asplenium lister, Asplenium longissimum, Asplenium lucidum, Asplenium lunulatum, Asplenium lyallii, Asplenium macedonicum, Asplenium majoricum, Asplenium marinum, Asplenium x microdon, Asplenium milnei Carruth, Asplenium montanum, Asplenium musifolium, Asplenium nidus, Asplenium normale, Asplenium obliquum, Asplenium oblongifolium, Asplenium obovatum, Asplenium obtusatum, Asplenium oligolepidum, Asplenium oligophlebium, Asplenium onopteris, Asplenium pacificum, Asplenium paleaceum, Asplenium palmer, Asplenium petrarchae, Asplenium pinnatifidum, Asplenium planicaule, Asplenium platybasis, Asplenium platyneuron, Asplenium polyodon, Asplenium praemorsum, Asplenium prolongatum, Asplenium pteridoides, Asplenium resiliens, Asplenium rhizophyllum, Asplenium richardii, Asplenium ruprechtii, Asplenium ruta-muraria, Asplenium rustifolium, Asplenium sagittatum, Asplenium sandersonii, Asplenium x samiense, Asplenium schizotrichum, Asplenium schweinfurthii, Asplenium scleroprium, Asplenium scolopendrium (syn. Phyllitis scolopendrium), Asplenium seelosii, Asplenium septentrionale, Asplenium septentrionale x trichomanes, Asplenium serra, Asplenium serratum, Asplenium sessilifolium, Asplenium shuttleworthianum, Asplenium simplicifrons, Asplenium splendens, Asplenium surrogatum, Asplenium tenerum, Asplenium terrestre, Asplenium theciferum, Asplenium thunbergii, Asplenium trichomanes, Asplenium tutwilerae, Asplenium vespertinum, Asplenium vieillardii, Asplenium virens, Asplenium viride, Asplenium vittiforme, and Asplenium viviparum.

[0148] In some embodiments the PtIP-83 polypeptide is derived from a fern species in the Order Polypodiales, Family Blechnaceae, Genus Blecnum.

[0149] In some embodiments the the PtIP-83 polypeptide is derived from a fem species in the Order Polypodiales, Family Dryopteridaceae Genus Acrophorus, Genus Acrorumohra, Genus Anapausia, Genus Arachniodes, Genus Bolbitis, Genus Ctenitis, Genus Cyclodium, Genus Cyrtogonellum, Genus Cyrtomidictyum, Genus Cyrtomium, Genus Diacalpe, Genus Didymochlaena, Genus Dryopsis, Genus Dryopteris, Genus Elaphoglossum, Genus Hypodematium, Genus Lastreopsis, Genus Leptorumohra, Genus Leucostegia, Genus Lithostegia, Genus Lomagramma, Genus Maxonia, Genus Megalastrum, Genus Olfersia, Genus Peranema, Genus Phanerophlebia, Genus Phanerophlebiopsis, Genus Polybotrya, Genus Polystichopsis, Genus Polystichum, Genus Rumohra, Genus Sorolepidium, Genus Stigmatopteris or Genus Teratophyllum.

[0150] In some embodiments the PtIP-83 polypeptide is derived from a fern species in the Order Polypodiales, Family Dryopteridaceae, Genus Polystichum. In some embodiments the nucleic acid molecule encoding the PtIP-83 polypeptide is derived from a fern species in the Order Polypodiales, Family Dryopteridaceae, Genus Polystichum selected from but not limited to Polystichum acanthophyllum, Polystichum acrostichoides, Polystichum aculeatum, Polystichum acutidens, Polystichum acutipinnulum, Polystichum alcicorne, Polystichum aleuticum, Polystichum andersonii, Polystichum atkinsonii, Polystichum australiense, Polystichum bakerianum, Polystichum biaristatum, Polystichum bomiense, Polystichum bonseyi, Polystichum brachypterum, Polystichum braunii, Polystichum brachypterum, Polystichum calderonense, Polystichum californicum, Polystichum capillipes, Polystichum castaneum, Polystichum chilense, Polystichum christii Ching, Polystichum chunii Ching, Polystichum craspedosorum, Polystichum cyclolobum, Polystichum cystostegia, Polystichum deltodon, Polystichum dielsii, Polystichum discretum, Polystichum drepanum, Polystichum dudleyi, Polystichum duthiei, Polystichum echinatum, Polystichum erosum, Polystichum excellens, Polystichum eximium, Polystichum falcatipinnum, Polystichum falcinellum, Polystichum fallax, Polystichum formosanum, Polystichum gongboense, Polystichum grandifrons, Polystichum gymnocarpium, Polystichum haleakalense, Polystichum hancockii, Polystichum hecatopteron, Polystichum herbaceum, Polystichum imbricans, Polystichum incongruum, Polystichum kruckebergii, Polystichum kwakiutlii, Polystichum lachenense, Polystichum lanceolatum, Polystichum lemmonii, Polystichum lentum, Polystichum lonchitis, Polystichum longidens, Polystichum longipaleatum, Polystichum longipes, Polystichum luctuosum, Polystichum macleae, Polystichum macrochlaenum, Polystichum makinoi, Polystichum martini, Polystichum mayebarae, Polystichum mediocre, Polystichum medogense, Polystichum microchlamys, Polystichum mohrioides, Polystichum mollissimum, Polystichum monticola, Polystichum moorei, Polystichum morii, Polystichum moupinense, Polystichum muricatum, Polystichum nakenense, Polystichum neolobatum, Polystichum nepalense, Polystichum ningshenense, Polystichum obliquum, Polystichum omeiense, Polystichum ordinatum, Polystichum orientalitibeticum, Polystichum paramoupinense, Polystichum parvipinnulum, Polystichum piceopaleaceum, Polystichum polyblepharum, Polystichum prescottianum, Polystichum prionolepis, Polystichum proliferum, Polystichum pseudocastaneum], Polystichum pseudomakinoi, Polystichum punctiferum, Polystichum pungens, Polystichum qamdoense, Polystichum retrosopaleaceum, Polystichum rhombiforme, Polystichum rhomboidea, Polystichum richardii, Polystichum rigens, Polystichum rotundilobum, Polystichum scopulinum, Polystichum semifertile, Polystichum setiferum, Polystichum setigerum, Polystichum shensiense, Polystichum silvaticum, Polystichum simplicipinnum, Polystichum sinense, Polystichum squarrosum, Polystichum stenophyllum, Polystichum stimulans, Polystichum submite, Polystichum tacticopterum, Polystichum thomsoni, Polystichum tibeticum, Polystichum transvaalense, Polystichum tripteron, Polystichum tsus-simense, Polystichum vestitum, Polystichum wattii, Polystichum whiteleggei, Polystichum xiphophyllum, Polystichum yadongense, and Polystichum yunnanense.

[0151] In some embodiments the PtIP-83 polypeptide is derived from a fern species in the Order Polypodiales, Family Dryopteridaceae, Genus Rumohra. In some embodiments the nucleic acid molecule encoding the PtIP-83 polypeptide is derived from a fern species in the Order Polypodiales, Family Dryopteridaceae, Genus Rumohra selected from but not limited to Rumohra adiantiformis, Rumohra aristata, Rumohra bartonae, Rumohra berteroana, Rumohra capuronii, Rumohra glandulosa, Rumohra humbertii, Rumohra linearisquamosa, Rumohra lokohensis, Rumohra madagascarica, and Rumohra quadrangularis.

[0152] In some embodiments the PtIP-83 polypeptide is derived from a fern species in the Order Polypodiales, Family Lomariopsidaceae, Genus Nephrolepis.

[0153] In some embodiments the PtIP-83 polypeptide is derived from a fern species in the Order Polypodiales, Family Polypodiaceae, Genus Campyloneurum, Genus Drynaria, Genus Lepisorus, Genus Microgramma, Genus Microsorum, Genus Neurodium, Genus Niphidium, Genus Pecluma M. G., Genus Phlebodium, Genus Phymatosorus, Genus Platycerium, Genus Pleopeltis, Genus Polypodium.

[0154] In some embodiments the PtIP-83 polypeptide is derived from a fern species in the Order Polypodiales, Family Polypodiaceae, Genus Microsorum.

[0155] In some embodiments the PtIP-83 polypeptide is derived from a fern species in the Order Polypodiales, Family Polypodiaceae, Genus Microsorum selected from but not limited to Microsorum alatum, Microsorum angustifolium, Microsorum aurantiacum, Microsorum australiense, Microsorum baithoense, Microsorum basicordatum, Microsorum biseriatum, Microsorum brassii, Microsorum buergerianum, Microsorum chapaense, Microsorum cinctum, Microsorum commutatum, Microsorum congregatifolium, Microsorum cuneatum, Microsorum cuspidatum, Microsorum dengii, Microsorum egregium, Microsorum emeiensis, Microsorum ensatum, Microsorum ensiforme, Microsorum excelsum, Microsorum fortunei, Microsorum griseorhizoma, Microsorum grossum, Microsorum hemionitideum, Microsorum henryi, Microsorum heterocarpum, Microsorum heterolobum, Microsorum howense, Microsorum insigne, Microsorum intermedium, Microsorum kongtingense, Microsorum krayanense, Microsorum lanceolatum, Microsorum lancifolium, Microsorum lastii, Microsorum latilobatum, Microsorum leandrianum, Microsorum lineare, Microsorum linguiforme, Microsorum longissimum, Microsorum longshengense, Microsorum maculosum, Microsorum maximum, Microsorum membranaceum, Microsorum membranifolium, Microsorum microsorioides, Microsorum minor, Microsorum monstrosum, Microsorum muliense, Microsorum mutense, Microsorum nanchuanense, Microsorum ningpoense, Microsorum normale, Microsorum novae-zealandiae, Microsorum ovalifolium, Microsorum ovatum, Microsorum palmatopedatum, Microsorum pappei, Microsorum papuanum, Microsorum parksii, Microsorum pentaphyllum, Microsorum piliferum, Microsorum pitcairnense, Microsorum powellii, Microsorum pteropodum, Microsorum pteropus, Microsorum punctatum, Microsorum pustulatum, Microsorum rampans, Microsorum revolutum, Microsorum rubidum, Microsorum samarense, Microsorum sapaense, Microsorum sarawakense, Microsorum scandens, Microsorum scolopendria, Microsorum sibomense, Microsorum sinense, Microsorum sopuense, Microsorum spectrum, Microsorum steerei, Microsorum subhemionitideum, Microsorum submarginale, Microsorum subnudum, Microsorum superficiale, Microsorum takhtajanii, Microsorum tenuipes, Microsorum tibeticum, Microsorum triglossum, Microsorum truncatum, Microsorum tsaii, Microsorum varians, Microsorum venosum, Microsorum vieillardii, Microsorum x inaequibasis, Microsorum yiliangensis, and Microsorum zippelii.

[0156] In some embodiments the PtIP-83 polypeptide is derived from a fem species in the Order Polypodiales, Family Polypodiaceae, Genus Polypodium L.

[0157] In some embodiments the PtIP-83 polypeptide is derived from a fem species in the Order Polypodiales, Family Polypodiaceae, Genus Polypodium L. selected from but not limited to Polypodium absidatum, Polypodium acutifolium, Polypodium adiantiforme, Polypodium aequale, Polypodium affine, Polypodium albidopaleatum, Polypodium alcicorne, Polypodium alfarii, Polypodium alfredii, Polypodium alfredii var. curtii, Polypodium allosuroides, Polypodium alsophilicola, Polypodium amamianum, Polypodium amoenum, Polypodium amorphum, Polypodium anetioides, Polypodium anfractuosum, Polypodium anguinum, Polypodium angustifolium f. remotifolia, Polypodium angustifolium var. amphostenon, Polypodium angustifolium var. heterolepis, Polypodium angustifolium var. monstrosa, Polypodium angustipaleatum, Polypodium angustissimum, Polypodium anisomeron var. pectinatum, Polypodium antioquianum, Polypodium aoristisorum, Polypodium apagolepis, Polypodium apicidens, Polypodium apiculatum, Polypodium apoense, Polypodium appalachianum, Polypodium appressum, Polypodium arenarium, Polypodium argentinum, Polypodium argutum, Polypodium armatum, Polypodium aromaticum, Polypodium aspersum, Polypodium assurgens, Polypodium atrum, Polypodium auriculatum, Polypodium balaonense, Polypodium balliviani, Polypodium bamleri, Polypodium bangii, Polypodium bartlettii, Polypodium basale, Polypodium bemoullii, Polypodium biauritum, Polypodium bifrons, Polypodium blepharodes, Polypodium bolivari, Polypodium bolivianum, Polypodium bolobense, Polypodium bombycinum, Polypodium bombycinum var. insularum, Polypodium bradeorum, Polypodium bryophilum, Polypodium bryopodum, Polypodium buchtienii, Polypodium buesii, Polypodium bulbotrichum, Polypodium caceresii, Polypodium califomicum f. brauscombii, Polypodium califomicum f. parsonsiae, Polypodium californicum, Polypodium calophlebium, Polypodium calvum, Polypodium camptophyllarium var. abbreviatum, Polypodium capitellatum, Polypodium carpinterae, Polypodium chachapoyense, Polypodium chartaceum, Polypodium chimantense, Polypodium chiricanum, Polypodium choquetangense, Polypodium christensenii, Polypodium christii, Polypodium chrysotrichum, Polypodium ciliolepis, Polypodium cinerascens, Polypodium collinsii, Polypodium colysoides, Polypodium confluens, Polypodium conforme, Polypodium confusum, Polypodium congregatifolium, Polypodium connellii, Polypodium consimile var. bourgaeanum, Polypodium consimile var. minor, Polypodium conterminans, Polypodium contiguum, Polypodium cookii, Polypodium coriaceum, Polypodium coronans, Polypodium costaricense, Polypodium costatum, Polypodium crassifolium f. angustissimum, Polypodium crassifolium var. longipes, Polypodium crassulum, Polypodium craterisorum, Polypodium cryptum, Polypodium crystalloneuron, Polypodium cucullatum var. planum, Polypodium cuencanum, Polypodium cumingianum, Polypodium cupreolepis, Polypodium curranii, Polypodium curvans, Polypodium cyathicola, Polypodium cyathisorum, Polypodium cyclocolpon, Polypodium daguense, Polypodium damunense, Polypodium dareiformioides, Polypodium dasypleura, Polypodium decipiens, Polypodium decorum, Polypodium delicatulum, Polypodium deltoideum, Polypodium demeraranum, Polypodium denticulatum, Polypodium diaphanum, Polypodium dilatatum, Polypodium dispersum, Polypodium dissectum, Polypodium dissimulans, Polypodium dolichosorum, Polypodium dolorense, Polypodium donnell-smithii, Polypodium drymoglossoides, Polypodium ebeninum, Polypodium eggersii, Polypodium elmeri, Polypodium elongatum, Polypodium enterosoroides, Polypodium erubescens, Polypodium erythrolepis, Polypodium erythrotrichum, Polypodium eurybasis, Polypodium eurybasis var. villosum, Polypodium exomans, Polypodium falcoideum, Polypodium fallacissimum, Polypodium farinosum, Polypodium faucium, Polypodium feei, Polypodium ferrugineum, Polypodium feuillei, Polypodium firmulum, Polypodium firmum, Polypodium flaccidum, Polypodium flagellare, Polypodium flexuosum, Polypodium flexuosum var. ekmanii, Polypodium forbesii, Polypodium formosanum, Polypodium fraxinifolium subsp. articulatum, Polypodium fraxinifolium subsp. luridum, Polypodium fructuosum, Polypodium fucoides, Polypodium fulvescens, Polypodium galeottii, Polypodium glaucum, Polypodium glycyrrhiza, Polypodium gracillimum, Polypodium gramineum, Polypodium grandifolium, Polypodium gratum, Polypodium graveolens, Polypodium griseo-nigrum, Polypodium griseum, Polypodium guttatum, Polypodium haalilioanum, Polypodium hammatisorum, Polypodium hancockii, Polypodium haplophlebicum, Polypodium harrisii, Polypodium hastatum var. simplex, Polypodium hawaiiense, Polypodium heanophyllum, Polypodium helleri, Polypodium hemionitidium, Polypodium henryi, Polypodium herzogii, Polypodium hesperium, Polypodium hessii, Polypodium hombersleyi, Polypodium hostmannii, Polypodium humile, Polypodium hyalinum, Polypodium iboense, Polypodium induens var. subdentatum, Polypodium insidiosum, Polypodium insigne, Polypodium intermedium subsp. masafueranum var. obtuseserratum, Polypodium intramarginale, Polypodium involutum, Polypodium itatiayense, Polypodium javanicum, Polypodium juglandifolium, Polypodium kaniense, Polypodium knowltoniorum, Polypodium kyimbilense, Polypodium l'herminieri var. costaricense, Polypodium lachniferum f. incurvata, Polypodium lachniferum var. glabrescens, Polypodium lachnopus, Polypodium lanceolatum var. complanatum, Polypodium lanceolatum var. trichophorum, Polypodium latevagans, Polypodium laxifrons, Polypodium laxifrons var. lividum, Polypodium lehmannianum, Polypodium leiorhizum, Polypodium leptopodon, Polypodium leuconeuron var. angustifolia, Polypodium leuconeuron var. latifolium, Polypodium leucosticta, Polypodium limulum, Polypodium lindigii, Polypodium lineatum, Polypodium lomarioides, Polypodium longifrons, Polypodium loretense, Polypodium loriceum var. umbraticum, Polypodium loriforme, Polypodium loxogramme f. gigas, Polypodium ludens, Polypodium luzonicum, Polypodium lycopodioides f. obtusum, Polypodium lycopodioides L., Polypodium macrolepis, Polypodium macrophyllum, Polypodium macrosorum, Polypodium macrosphaerum, Polypodium maculosum, Polypodium madrense, Polypodium manmeiense, Polypodium margaritiferum, Polypodium maritimum, Polypodium martensii, Polypodium mayoris, Polypodium megalolepis, Polypodium melanotrichum, Polypodium menisciifolium var. pubescens, Polypodium meniscioides, Polypodium merrillii, Polypodium mettenii, Polypodium mexiae, Polypodium microsorum, Polypodium militare, Polypodium minimum, Polypodium minusculum, Polypodium mixtum, Polypodium mollendense, Polypodium mollissimum, Polypodium moniliforme var. minus, Polypodium monoides, Polypodium monticola, Polypodium montigenum, Polypodium moritzianum, Polypodium moultonii, Polypodium multicaudatum, Polypodium multilineatum, Polypodium multisorum, Polypodium munchii, Polypodium muscoides, Polypodium myriolepis, Polypoadium myriophyllum, Polypoadium myriotrichum, Polypodium nematorhizon, Polypodium nemorale, Polypodium nesioticum, Polypodium nigrescentium, Polypodium nigripes, Polypodium nigrocinctum, Polypodium nimbatum, Polypodium nitidissimum, Polypodium nitidissimum var. latior, Polypodium nubrigenum, Polypodium oligolepis, Polypodium oligosorum, Polypodium oligosorum, Polypodium olivaceum, Polypodium olivaceum var. elatum, Polypodium oodes, Polypodium oosphaerum, Polypodium oreophilum, Polypodium ornatissimum, Polypodium ornatum, Polypodium ovatum, Polypodium oxylobum, Polypodium oxypholis, Polypodium pakkaense, Polypodium pallidum, Polypodium palmatopedatum, Polypodium palmeri, Polypodium panamense, Polypodium parvum, Polypodium patagonicum, Polypodium paucisorum, Polypodium pavonianum, Polypodium pectinatum var. caliense, Polypodium pectinatum var. hispidum, Polypodium pellucidum, Polypodium pendulum var. boliviense, Polypodium percrassum, Polypodium perpusillum, Polypodium peruvianum var. subgibbosum, Polypodium phyllitidis var. elongatum, Polypodium pichinchense, Polypodium pilosissimum, Polypodium pilosissimum var. glabriusculum, Polypodium pilossimum var. tunguraquensis, Polypodium pityrolepis, Polypodium platyphyllum, Polypodium playfairii, Polypodium plebeium var. cooperi, Polypodium plectolepidioides, Polypodium pleolepis, Polypodium plesiosorum var.i, Polypodium podobasis, Polypodium podocarpum, Polypodium poloense, Polypodium polydatylon, Polypodium polypodioides var. aciculare, Polypodium polypodioides var. michauxianum, Polypodium praetermissum, Polypodium preslianum var. immersum, Polypodium procerum, Polypodium procerum, Polypodium productum, Polypodium productum, Polypodium prolongilobum, Polypodium propinguum, Polypodium proteus, Polypodium pruinatum, Polypodium pseudocapillare, Polypodium pseudofraternum, Polypodium pseudonutans, Polypodium pseudoserratum, Polypodium pulcherrimum, Polypodium pulogense, Polypodium pungens, Polypodium purpusii, Polypodium radicale, Polypodium randallii, Polypodium ratiborii, Polypodium reclinatum, Polypodium recreense, Polypodium repens var. abruptum, Polypodium revolvens, Polypodium rhachipterygium, Polypodium rhomboideum, Polypodium rigens, Polypodium robustum, Polypodium roraimense, Polypodium roraimense, Polypodium rosei, Polypodium rosenstockii, Polypodium rubidum, Polypodium rudimentum, Polypodium rusbyi, Polypodium sablanianum, Polypodium sarmentosum, Polypodium saxicola, Polypodium schenckii, Polypodium schlechteri, Polypodium scolopendria, Polypodium scolopendria, Polypodium scolopendrium, Polypodium scouleri, Polypodium scutulatum, Polypodium segregatum, Polypodium semihirsutum, Polypodium semihirsutum var. fuscosetosum, Polypodium senile var. minor, Polypodium sericeolanatum, Polypodium serraeforme, Polypodium serricula, Polypodium sesquipedala, Polypodium sessilifolium, Polypodium setosum var. calvum, Polypodium setulosum, Polypodium shaferi, Polypodium sibomense, Polypodium siccum, Polypodium simacense, Polypodium simulans, Polypodium singer, Polypodium sinicum, Polypodium sintenisii, Polypodium skutchii, Polypodium sloanei, Polypodium sodiroi, Polypodium sordidulum, Polypodium sordidum, Polypodium sphaeropteroides, Polypodium sphenodes, Polypodium sprucei, Polypodium sprucei var. furcativenosa, Polypodium steirolepis, Polypodium stenobasis, Polypodium stenolepis, Polypodium stenopterum, Polypodium subcapillare, Polypodium subflabelliforme, Polypodium subhemionitidium, Polypodium subinaequale, Polypodium subintegrum, Polypodium subspathulatum, Polypodium subtile, Polypodium subvestitum, Polypodium subviride, Polypodium superficiale var. attenuatum, Polypodium superficiale var. chinensis, Polypodium sursumcurrens, Polypodium tablazianum, Polypodium taenifolium, Polypodium tamandarei, Polypodium tatei, Polypodium tenuiculum var. acrosora, Polypodium tenuiculum var. brasiliense, Polypodium tenuilore, Polypodium tenuinerve, Polypodium tepuiense, Polypodium teresae, Polypodium tetragonum var. incompletum, Polypodium thysanolepis var. bipinnatifidum, Polypodium thyssanolepis, var. thyssanolepis, Polypodium thyssanolepsi, Polypodium tobagense, Polypodium trichophyllum, Polypodium tridactylum, Polypodium tridentatum, Polypodium trifurcatum var. brevipes, Polypodium triglossum, Polypodium truncatulum, Polypodium truncicola var. major, Polypodium truncicola var. minor, Polypodium tuberosum, Polypodium tunguraguae, Polypodium turquinum, Polypodium turrialbae, Polypodium ursipes, Polypodium vagans, Polypodium valdealatum, Polypodium versteegii, Polypodium villagranii, Polypodium virginianum f. cambroideum, Polypodium virginianum f. peraferens, Polypodium vittarioides, Polypodium vulgare, Polypodium vulgare L., Polypodium vulgare subsp. oreophilum, Polypodium vulgare var. acuminatum, Polypodium vulpinum, Polypoadium williamsii, Polypoadium wobbense, Polypoadium x fallacissimum-guttatum, Polypodium xantholepis, Polypodium xiphopteris, Polypodium yarumalense, Polypodium yungense, and Polypodium zosteriforme.

[0158] In some embodiments the PtIP-83 polypeptide is derived from a fem species in the Order Polypodiales, Family Polypodiaceae, Genus Platycerium.

[0159] In some embodiments the PtIP-83 polypeptide is derived from a species in the Division Lycophyta.

[0160] In some embodiments the PtIP-83 polypeptide is derived from a species in the Class Isoetopsida or Class Lycopodiopsida.

[0161] In some embodiments the PtIP-83 polypeptide is derived from a species in the Class Isoetopsida Order Selaginales. In some embodiments the PtIP-83 polypeptide is derived from a fern species in the Class Isoetopsida, Order Selaginales, Family Selaginellaceae. In some embodiments the PtIP-83 polypeptide is derived from a species in the Genus Selaginella. In some embodiments the PtIP-83 polypeptide is derived from a species in the Class Lycopodiopsida, Order Lycopodiales.

[0162] In some embodiments the PtIP-83 polypeptide is derived from a fem species in the Class Lycopodiopsida, Order Lycopodiales Family Lycopodiaceae or Family Huperziaceae.

[0163] In some embodiments the PtIP-83 polypeptide is derived from a species in the Genus Austrolycopodium, Dendrolycopodium, Diphasiastrum, Diphasium, Huperzia, Lateristachys, Lycopodiastrum, Lycopodiella, Lycopodium, Palhinhaea, Pseudodiphasium, Pseudolycopodiella, Pseudolycopodium or Spinulum.

[0164] In some embodiments the PtIP-83 polypeptide is derived from a species in the Genus Lycopodium.

[0165] In some embodiments the PtIP-83 polypeptide is derived from a species in the Genus Huperzia.

### Phylogenetic, Sequence Motif, and Structural Analyses for Insecticidal Protein Families

[0166] The sequence and structure analysis method employed is composed of four components: phylogenetic tree construction, protein sequence motifs finding, secondary structure prediction, and alignment of protein sequences and secondary structures. Details about each component are illustrated below.

### Phylogenetic Tree Construction

[0167] The phylogenetic analysis was performed using the software MEGA5. Protein sequences were subjected to ClustalW version 2 analysis (Larkin M. A et al (2007) Bioinformatics 23(21): 2947-2948) for multiple sequence alignment. The evolutionary history was then inferred by the Maximum Likelihood method based on the JTT matrix-based model. The tree with the highest log likelihood was obtained, exported in Newick format, and further processed to extract the sequence IDs in the same order as they appeared in the tree. A few clades representing sub-families were manually identified for each insecticidal protein family.

### Protein Sequence Motifs Finding

[0168] Protein sequences were re-ordered according to the phylogenetic tree built previously, and fed to the MOTIF analysis tool MEME (Multiple EM for MOTIF Elicitation) (Bailey T. L., and Elkan C., Proceedings of the Second International Conference on Intelligent Systems for Molecular Biology, pp. 28-36, AAAI Press, Menlo Park, California, 1994) for identification of key sequence motifs. MEME was setup as follows: Minimum number of sites 2, Minimum motif width 5, and Maximum number of motifs 30. Sequence motifs unique to each sub-family were identified by visual observation. The distribution of MOTIFs across the entire gene family could be visualized in HTML webpage. The MOTIFs are numbered relative to the ranking of the E-value for each MOTIF. The amino acid sequence MOTIFs identified for each of the PtIP-83 polypeptides and the residue ranges defining the MOTIFs relative to each of the corresponding sequence identifier (SEQ ID NO:) are shown in Table 2. FIG. 2 shows an alignment of the PtIP-83 polypeptides PtIP-83Aa (SEQ ID NO: 1), PtIP-83Ca (SEQ ID NO: 5), PtIP-83Cb (SEQ ID NO: 7), PtIP-83Cc (SEQ ID NO: 9), PtIP-83Cd (SEQ ID NO: 11), PtIP-83Ce (SEQ ID NO: 13), PtIP-83Cf (SEQ ID NO: 15), and PtIP-83Fa (SEQ ID NO: 3), and the location relative to PtIP-83Aa (SEQ ID NO: 1) of the amino acid sequence MOTIFs present in PtIP-83Aa (SEQ ID NO: 1).

### Secondary Structure Prediction

[0169] PSIPRED, top ranked secondary structure prediction method (Jones D T. (1999) J. Mol. Biol. 292: 195-202), was installed in local Linux server, and used for protein secondary structure prediction. The tool provides accurate structure prediction using two feed-forward neural networks based on the PSI-BLAST output. The PSI-BLAST database was created by removing low-complexity, transmembrane, and coiled-coil regions in Uniref100. The PSIPRED results contain the PtIP-secondary structures (Alpha helix: H, Beta strand: E, and Coil: C) and the corresponding confidence scores for each amino acid in a given protein sequence. FIG. 2 shows the PtIP-83 polypeptide amino acid sequence alignments and the conserved secondary structural regions.

TABLE 2

| | SEQ | | | | | | |
|---|---|---|---|---|---|---|---|
| | ID | MOTIF | MOTIF | MOTIF | MOTIF | MOTIF | MOTIF |
| | NO: | 19 | 7 | 13 | 20 | 10 | 18 |
| PtIP- | 1 | 4-17 | 21-64 | 71-100 | 102- | n.p. | n.p. |
| 83Aa | | | | | 120 | | |
| PtIP- | 5 | 1-14 | 17-60 | 68-97 | 98-116 | 122- | 173- |
| 83Ca | | | | | | 171 | 208 |
| PtIP- | 7 | 1-14 | 17-60 | 69-98 | n.p. | 121- | n.p. |
| 83Cb | | | | | | 170 | |
| PtIP- | 9 | 1-14 | 17-60 | 68-97 | 98-116 | 122- | 173- |
| 83Cc | | | | | | 171 | 208 |
| PtIP- | 11 | 1-14 | 17-60 | 68-97 | 98-116 | 122- | 173- |
| 83Cd | | | | | | 171 | 208 |
| PtIP- | 13 | 1-14 | 17-60 | 68-97 | 98-116 | 121- | 173- |
| 83Ce | | | | | | 170 | 208 |
| PtIP- | 15 | 1-14 | 21-64 | 68-97 | 98-116 | 122- | n.p. |
| 83Cf | | | | | | 171 | |
| PtIP- | 3 | 5-18 | 17-60 | 68-97 | n.p. | n.p. | n.p. |
| 83Fa | | | | | | | |
| | SEQ | | | | | | |
| | ID | MOTIF | MOTIF | MOTIF | MOTIF | MOTIF | MOTIF |
| | NO: | 24 | 14 | 11 | 22 | 2 | 8 |
| PtIP- | 1 | n.p. | 238- | n.p. | 313- | 327- | 376- |
| 83Aa | | | 263 | | 326 | 376 | 425 |
| PtIP- | 5 | 211- | 221- | 248- | 298- | 312- | 362- |
| 83Ca | | 220 | 246 | 297 | 311 | 361 | 411 |
| PtIP- | 7 | n.p. | 223- | 249- | 299- | 313- | 363- |
| 83Cb | | | 248 | 298 | 312 | 362 | 412 |
| PtIP- | 9 | 211- | 221- | 248- | 298- | 312- | 362- |
| 83Cc | | 220 | 246 | 297 | 311 | 361 | 411 |
| PtIP- | 11 | 211- | 221- | 248- | 298- | 312- | 362- |
| 83Cd | | 220 | 246 | 297 | 311 | 361 | 411 |
| PtIP- | 13 | 211- | 221- | 248- | 298- | 312- | 362- |
| 83Ce | | 220 | 246 | 297 | 311 | 361 | 411 |
| PtIP- | 15 | 211- | 221- | 248- | 298- | 312- | 362- |
| 83Cf | | 220 | 246 | 297 | 311 | 361 | 411 |
| PtIP- | 3 | 247- | 262- | n.p. | 329- | 344- | 394- |
| 83Fa | | 256 | 287 | | 342 | 393 | 443 |
| | SEQ | | | | | | |
| | ID | MOTIF | MOTIF | MOTIF | MOTIF | MOTIF | MOTIF |
| | NO: | 21 | 15 | 9 | 1 | 17 | 6 |
| PtIP- | 1 | 508- | 428- | 455- | 523- | 576- | 596- |
| 83Aa | | 521 | 453 | 504 | 572 | 594 | 645 |
| PtIP- | 5 | 493- | 413- | 441- | 508- | 561- | 581- |
| 83Ca | | 506 | 438 | 490 | 557 | 579 | 630 |
| PtIP- | 7 | 494- | 414- | 442- | 509- | 562- | 582- |
| 83Cb | | 507 | 439 | 491 | 558 | 580 | 631 |
| PtIP- | 9 | 493- | 413- | 441- | 508- | 561- | 581- |
| 83Cc | | 506 | 438 | 490 | 557 | 579 | 630 |
| PtIP- | 11 | 493- | 413- | 441- | 508- | 561- | 581- |
| 83Cd | | 506 | 438 | 490 | 557 | 579 | 630 |
| PtIP- | 13 | 493- | 413- | 441- | 508- | 561- | 581- |
| 83Ce | | 506 | 438 | 490 | 557 | 579 | 630 |
| PtIP- | 15 | 493- | 413- | 441- | 508- | 561- | 581- |
| 83Cf | | 506 | 438 | 490 | 557 | 579 | 630 |
| PtIP- | 3 | 525- | 445- | 473- | 540- | 593- | 613- |
| 83Fa | | 538 | 470 | 522 | 589 | 611 | 662 |
| | SEQ | | | | | | |
| | ID | MOTIF | MOTIF | MOTIF | MOTIF | MOTIF | MOTIF |
| | NO: | 12 | 4 | 16 | 5 | 23 | 3 |
| PtIP- | 1 | 648- | 684- | 723- | 746- | 798- | 809- |
| 83Aa | | 683 | 719 | 741 | 795 | 807 | 858 |
| PtIP- | 5 | 634- | 670- | 708- | 732- | 784- | 795- |
| 83Ca | | 669 | 705 | 726 | 781 | 793 | 844 |
| PtIP- | 7 | 635- | 671- | 709- | 731- | 783- | 794- |
| 83Cb | | 670 | 706 | 727 | 780 | 792 | 843 |
| PtIP- | 9 | 634- | 670- | 708- | 730- | 782- | 793- |
| 83Cc | | 669 | 705 | 726 | 779 | 791 | 842 |
| PtIP- | 11 | 634- | 670- | 708- | 730- | 782- | 793- |
| 83Cd | | 669 | 705 | 726 | 779 | 791 | 842 |
| PtIP- | 13 | 634- | 670- | 708- | 730- | 782- | 793- |
| 83Ce | | 669 | 705 | 726 | 779 | 791 | 842 |
| PtIP- | 15 | 634- | 670- | 708- | 731- | 783- | 794- |
| 83Cf | | 669 | 705 | 726 | 780 | 792 | 843 |
| PtIP- | 3 | 667- | 703- | 740- | 763- | 815- | 826- |
| 83Fa | | 702 | 738 | 758 | 812 | 824 | 875 |

n.p. = not present

### Alignment of Protein Sequences and Secondary Structures

[0170] A customized script was developed to generate gapped secondary structure alignment according to the multiple protein sequence alignment from step 1 for all proteins. All aligned protein sequences and structures were concatenated into a single FASTA file, and then imported into MEGA for visualization and identification of conserved structures.

[0171] In some embodiments a PtIP-83 polypeptide comprises an amino acid sequence MOTIF selected from: an amino acid sequence MOTIF 1 as represented by an amino acid sequence of the formula MP[DE]MPSEADWSIFVNE[IV]EAVAEGMPTEVSEVP[AV]WKAKCKN[MV]AALGREM[S C]I (SEQ ID NO: 646); an amino acid sequence MOTIF 2 as represented by an amino acid sequence of the formula PQLQYRMYG[NS]LI[KN]QMAQVAQNYDQ[ED]FKQ[FL]KLFI[IA]QNQI[LF]GSYLLQQN[KR]AF (SEQ ID NO: 647); an amino acid sequence MOTIF 3 as represented by an amino acid sequence of the formula NTFMQMTPFTRWRLRLSASASENA[EG]LAFPTATA[PL]DSTT[EQ][IV]VITFHVTAIR (SEQ ID NO: 648); an amino acid sequence MOTIF 4 as represented by an amino acid sequence of the formula [DN]FTSRHVVK[GD]IPVSLLLDGEDWEFEIPVQ[AG]GMSSFP (SEQ ID NO: 649); an amino acid sequence MOTIF 5 as represented by an amino acid sequence of the formula IIHQP[SA]T[RQ][ST]G[IT]VYILLQGSTIFHDRRR[DE]EVMTFQAA[DA]PLN[FY][QH]YAY RLDTG (SEQ ID NO: 650); an amino acid sequence MOTIF 6 as represented by an amino acid sequence of the formula S[HQ]ADRLAAIQP[AV]DLTN[HY]LEMAT[HQ]MDMRTT[RS][MI]L[IL]GLLN[MI]LRIQNAA LMYEY (SEQ ID NO: 651); an amino acid sequence MOTIF 7 as represented by an amino acid sequence of the formula [VL]DRVEFSEVMVIHRMYVRL[SA]DL[ND]VGEL[PE]GA[EG][RK]VKR[VL]YV[FL]ADVV E (SEQ ID NO: 652); an amino acid sequence MOTIF 8 as represented by an amino acid sequence of the formula A[DE]RELQMESFHSAVISQRRQEL[ND]TA[IF]AKM[DE]R[LM]SLQMEEE[NS]RAMEQA QKEM (SEQ ID NO: 653); an amino acid sequence MOTIF 9 as represented by an amino acid sequence of the formula FVTAGATAPGA[AV]ASAGQAVSIAGQAAQ[AG]LRRVVEILE[GQ]LEAVMEVVAA[VI]K (SEQ ID NO: 654); an amino acid sequence MOTIF 10 as represented by an amino acid sequence of the formula DGMNWG[IT]YI[YH]GE[KE]V[EQ]RSPLLPSNAILAVWADRC[TI]ITSARHNH[VF]NAPGR [IV]I (SEQ ID NO: 655); an amino acid sequence MOTIF 11 as represented by an amino acid sequence of the formula [KV][VK][CA]RPPSPDM[MV]SAVAEHALWLNDVLLQVVQ[KN]ESQ[LM]QGT[AE]PYNE CLALLGR (SEQ ID NO: 656); an amino acid sequence MOTIF 12 as represented by an amino acid sequence of the formula PTELT[VA]WPLGMDTV[AG]NLLIAQENAAL[VL]GLIQLGPSS (SEQ ID NO: 657); an amino acid sequence MOTIF 13 as represented by an amino acid sequence of the formula RDQ[MT][HQ]MPGSVTVI[IV]LCRLLQFP[IT]DGSQA[TA]T (SEQ ID NO: 658); an amino acid sequence MOTIF 14 as represented by an amino acid sequence of the formula TSIPVEVVTDP[SN]ILLGMQTTV[LH]IAEL (SEQ ID NO: 659); an amino acid sequence MOTIF 15 as represented by an amino acid sequence of the formula EGLR[EQ]FQNRQVARA[VL]FAVLKAVA[MQ]I[AG](SEQ ID NO: 660); an amino acid sequence MOTIF 16 as represented by an amino acid sequence of the formula W[TS]RVRIRHLEM[QH]F[AV]QEASG (SEQ ID NO: 661); an amino acid sequence MOTIF 17 as represented by an amino acid sequence of the formula QISELQY[ED]IWVQG[LM][ML]RDIA (SEQ ID NO: 662); an amino acid sequence MOTIF 18 as represented by an amino acid sequence of the formula TFTLGSGVTGITSMHGEPSLDPWNGVSLDSASPTAF (SEQ ID NO: 663); an amino acid sequence MOTIF 19 as represented by an amino acid sequence of the formula MDYSTLYRDLNQIS (SEQ ID NO: 664); an amino acid sequence MOTIF 20 as represented by an amino acid sequence of the formula LRLPFM[QK]LHARVIEQN[VR]K[SE](SEQ ID NO: 665); an amino acid sequence MOTIF 21 as represented by an amino acid sequence of the formula VDSLEQVG[QH][IL]V[GD]AP (SEQ ID NO: 666); an amino acid sequence MOTIF 22 as represented by an amino acid sequence of the formula [IV][EQ][CA]VMK[IM]GRF[VG][SL]VV (SEQ ID NO: 667); an amino acid sequence MOTIF 23 as represented by an amino acid sequence of the formula TLTNEPSE[EQ]F (SEQ ID NO: 668); and an amino acid sequence MOTIF 24 as represented by an amino acid sequence of the formula LPRQSRNISF (SEQ ID NO: 669).

[0172] In some embodiments a PtIP-83 polypeptide comprises an amino acid sequence MOTIF selected from: an amino acid sequence MOTIF 1 having at least 90% sequence identity to the amino acid sequence as represented by the formula MP[DE]MPSEADWSIFVNE[IV]EAVAEGMPTEVSEVP[AV]WKAKCKN[MV]AALGREM[S C]I (SEQ ID NO: 646); an amino acid sequence MOTIF 2 having at least 90% sequence identity to the amino acid sequence as represented by the formula PQLQYRMYG[NS]LI[KN]QMAQVAQNYDQ[ED]FKQ[FL]KLFI[IA]QNQI[LF]GSYLLQQN[KR]AF (SEQ ID NO: 647); an amino acid sequence MOTIF 3 having at least 90% sequence identity to the amino acid sequence as represented by the formula NTFMQMTPFTRWRLRLSASASENA[EG]LAFPTATA[PL]DSTT[EQ][IV]VITFHVTAIR (SEQ ID NO: 648); an amino acid sequence MOTIF 4 having at least 90% sequence identity to the amino acid sequence as represented by the formula [DN]FTSRHVVK[GD]IPVSLLLDGEDWEFEIPVQ[AG]GMSSFP (SEQ ID NO: 649); an amino acid sequence MOTIF 5 having at least 90% sequence identity to the amino acid sequence as represented by the formula IIHQP[SA]T[RQ][ST]G[IT]VYILLQGSTIFHDRRR[DE]EVMTFQAA[DA]PLN[FY][QH]YAY RLDTG (SEQ ID NO: 650); an amino acid sequence MOTIF 6 having at least 90% sequence identity to the amino acid sequence as represented by the formula S[HQ]ADRLAAIQP[AV]DLTN[HY]LEMAT[HQ]MDMRTT[RS][MI]L[IL]GLLN[MI]LRIQNAA LMYEY (SEQ ID NO: 651); an amino acid sequence MOTIF 7 having at least 90% sequence identity to the amino acid sequence as represented by the formula [VL]DRVEFSEVMVIHRMYVRL[SA]DL[ND]VGEL[PE]GA[EG][RK]VKR[VL]YV[FL]ADVV E (SEQ ID NO: 652); an amino acid sequence MOTIF 8 having at least 90% sequence identity to the amino acid sequence as represented by the formula A[DE]RELQMESFHSAVISQRRQEL[ND]TA[IF]AKM[DE]R[LM]SLQMEEE[NS]RAMEQA QKEM (SEQ ID NO: 653); an amino acid sequence MOTIF 9 having at least 90% sequence identity to the amino acid sequence as represented by the formula FVTAGATAPGA[AV]ASAGQAVSIAGQAAQ[AG]LRRVVEILE[GQ]LEAVMEVVAA[VI]K (SEQ ID NO: 654); an amino acid sequence MOTIF 10 having at least 90% sequence identity to the amino acid sequence as represented by the formula DGMNWG[IT]YI[YH]GE[KE]V[EQ]RSPLLPSNAILAVWADRC[TI]ITSARHNH[VF]NAPGR [IV]I (SEQ ID NO: 655); an amino acid sequence MOTIF 11 having at least 90% sequence identity to the amino acid sequence as represented by the formula [KV][VK][CA]RPPSPDM[MV]SAVAEHALWLNDVLLQVVQ[KN]ESQ[LM]QGT[AE]PYNE CLALLGR (SEQ ID NO: 656); an amino acid sequence MOTIF 12 having at least 90% sequence identity to the amino acid sequence as represented by the formula PTELT[VA]WPLGMDTV[AG]NLLIAQENAAL[VL]GLIQLGPSS (SEQ ID NO: 657); an amino acid sequence MOTIF 13 having at least 90% sequence identity to the amino acid sequence as represented by the formula RDQ[MT][HQ]MPGSVTVI[IV]LCRLLQFP[IT]DGSQA[TA]T (SEQ ID NO: 658); an amino acid sequence MOTIF 14 having at least 90% sequence identity to the amino acid sequence as represented by the formula TSIPVEVVTDP[SN]ILLGMQTTV[LH]IAEL (SEQ ID NO: 659); an amino acid sequence MOTIF 15 having at least 90% sequence identity to the amino acid sequence as represented by the formula EGLR[EQ]FQNRQVARA[VL]FAVLKAVA[MQ]I[AG](SEQ ID NO: 660); an amino acid sequence MOTIF 16 having at least 90% sequence identity to the amino acid sequence as represented by the formula W[TS]RVRIRHLEM[QH]F[AV]QEASG (SEQ ID NO: 661); an amino acid sequence MOTIF 17 having at least 90% sequence identity to the amino acid sequence as represented by the formula QISELQY[ED]IWVQG[LM][ML]RDIA (SEQ ID NO: 662); an amino acid sequence MOTIF 18 having at least 90% sequence identity to the amino acid sequence as represented by the formula TFTLGSGVTGITSMHGEPSLDPWNGVSLDSASPTAF (SEQ ID NO: 663); an amino acid sequence MOTIF 19 having at least 90% sequence identity to the amino acid sequence as represented by the formula MDYSTLYRDLNQIS (SEQ ID NO: 664); an amino acid sequence MOTIF 20 having at least 90% sequence identity to the amino acid sequence as represented by the formula LRLPFM[QK]LHARVIEQN[VR]K[SE](SEQ ID NO: 665); an amino acid sequence MOTIF 21 having at least 90% sequence identity to the amino acid sequence as represented by the formula VDSLEQVG[QH][IL]V[GD]AP (SEQ ID NO: 666); an amino acid sequence MOTIF 22 having at least 90% sequence identity to the amino acid sequence as represented by the formula [IV][EQ][CA]VMK[IM]GRF[VG][SL]VV (SEQ ID NO: 667); an amino acid sequence MOTIF 23 having at least 90% sequence identity to the amino acid sequence as represented by the formula TLTNEPSE[EQ]F (SEQ ID NO: 668); and an amino acid sequence MOTIF 24 having at least 90% sequence identity to the amino acid sequence as represented by the formula LPRQSRNISF (SEQ ID NO: 669).

[0173] In some embodiments a PtIP-83 polypeptide comprises an amino acid sequence MOTIF selected from: an amino acid sequence MOTIF 1 as represented by an amino acid sequence of the formula MP[DE]MP[ST][ED]ADWSIFVNE[IVL]EAVAEGMPTEVSEVP[AV]W[KR]AKCKN[MV]AA LGREM[SC]I (SEQ ID NO: 670); an amino acid sequence MOTIF 2 as represented by an amino acid sequence of the formula PQLQYRMYG[NS]LI[KRN]QMAQVAQNYD[QR][ED]FK[QR][FL][KR]LFI[IAVL]QNQI[LF]GSYLL[QE]QN[KR]AF (SEQ ID NO: 671); an amino acid sequence MOTIF 3 as represented by an amino acid sequence of the formula N[TK]FMQMTPFT[RH]WRLRLSASA[SPKA]EN[AK][EG]LAFPTATA[PL]DSTT[EQ][IV][V A]ITFHVTAIR (SEQ ID NO: 672); an amino acid sequence MOTIF 4 as represented by an amino acid sequence of the formula [DN]FTSRHVVK[GD]IPV[SN]LLLDG[EG]DWEFEIPVQ[AG]GMSSFP (SEQ ID NO: 673); an amino acid sequence MOTIF 5 as represented by an amino acid sequence of the formula IIHQP[SA]T[RQ][ST]G[IT][VI]YILLQGST[IV]FHDRRR[DE][EQ]V[ML]T[FP]QAA[DAV]PL N[FY][QH]YAYRLDTG (SEQ ID NO: 674); an amino acid sequence MOTIF 6 as represented by an amino acid sequence of the formula S[HQ]ADRLAAIQP[AV][DN]LTN[HYF]LEMAT[HQ]MDMRTT[RS][MI]L[IL]GLLN[MI][LM]RIQNAAL[MR]YEY (SEQ ID NO: 675); an amino acid sequence MOTIF 7 as represented by an amino acid sequence of the formula [VL]D[RQ]VEFSEVMVIHRMYV[N]RL[SA]DL[ND]V[GA][EQ]L[PE]GA[EG][RK]VKR[VL]Y V[FL]ADVVE (SEQ ID NO: 676); an amino acid sequence MOTIF 8 as represented by an amino acid sequence of the formula A[DE]RELQMESFH[SA]AVISQ[RK]R[QGE]EL[ND][TD][AT][IF]AKM[DE]R[LM]SLQMEE E[NSD][RG]AMEQA[QR]KEM (SEQ ID NO: 677); an amino acid sequence MOTIF 9 as represented by an amino acid sequence of the formula F[VL]TAGATAPGA[AV]ASAGQAV[SN]IAGQAAQ[AG]LRRVVEILE[GQ]LEAVMEVVAA[VI]K (SEQ ID NO: 678); an amino acid sequence MOTIF 10 as represented by an amino acid sequence of the formula D[GD][MA][NK]WG[IT]Y[IV][YH][GA]E[KE]V[EQ][RVL]SPL[LYF][PN][SNG][NW][ASP][IY]L[AGV]V[WE]A[DQ]R[CS][TI]IT[SA]A[RFM]HN[HVT][VF][ND][AER]PG[RW][IV][IR](SEQ ID NO: 679); an amino acid sequence MOTIF 11 as represented by an amino acid sequence of the formula [KV][VK][CA][RGC][PHY]PSP[DE][MIL][MV]SAV[AG][EV]HA[LIN]WL[NS][DK]VLL[QR]V VQ[KN]ES[QH][LM]QGT[AE][PSA]YNECLALLGR (SEQ ID NO: 680); an amino acid sequence MOTIF 12 as represented by an amino acid sequence of the formula [PN]T[EQ]LT[VAT]WPL[GR]MDTV[AG][ND]LLI[AT][QH]E[NS]AAL[VLS]GL[ITMA]QLG[P Q][SP]S (SEQ ID NO: 681); an amino acid sequence MOTIF 13 as represented by an amino acid sequence of the formula [RLC][DLWK][QNPR][MTP][HQR][MIL]PGSVTVI[IV]LCRLLQFP[IT][DG]G[SR][QFR][AS][TAD][TW](SEQ ID NO: 682); an amino acid sequence MOTIF 14 as represented by an amino acid sequence of the formula [TA][SGV][IL]PV[ED]VVTDP[SN]IL[LM]GMQT[TS]V[LH]IAEL (SEQ ID NO: 683); an amino acid sequence MOTIF 15 as represented by an amino acid sequence of the formula EGLR[EQ]FQN[RE]QVA[RN]A[VL]FAVL[KS][AS]VA[MQ]I[AG](SEQ ID NO: 684); an amino acid sequence MOTIF 16 as represented by an amino acid sequence of the formula W[TS]RVRIRHLEM[QH]F[AV][QK]E[AS][SM][GN](SEQ ID NO: 685); an amino acid sequence MOTIF 17 as represented by an amino acid sequence of the formula Q[IM]S[EQ]LQY[ED]IWVQG[LM][ML]RD[IM]A (SEQ ID NO: 686); an amino acid sequence MOTIF 18 as represented by an amino acid sequence of the formula TFTLGSGVTGITSMHGEPSLDPWNGVSLDSASPTAF (SEQ ID NO: 663); an amino acid sequence MOTIF 19 as represented by an amino acid sequence of the formula [MLV]DY[SK][TSK]L[YF][RE]DLNQIS (SEQ ID NO: 687); an amino acid sequence MOTIF 20 as represented by an amino acid sequence of the formula L[RHQ]L[PT]FM[QK]LHA[RIT][VQL][IR]E[QER][NF][VR][KWS][SE](SEQ ID NO: 688); an amino acid sequence MOTIF 21 as represented by an amino acid sequence of the formula V[DN][SA]L[ED]QV[GS][QH][IL]V[GD]AP (SEQ ID NO: 689); an amino acid sequence MOTIF 22 as represented by an amino acid sequence of the formula [IV][EQH][CAS][VA][MI]K[IM][GV][RP][FI][VG][SL]VV (SEQ ID NO: 690); an amino acid sequence MOTIF 23 as represented by an amino acid sequence of the formula TLTN[EQ]PSE[EQDH]F (SEQ ID NO: 691); and an amino acid sequence MOTIF 24 as represented by an amino acid sequence of the formula LP[RS]QS[RT]N[IV]SF (SEQ ID NO: 692).

[0174] In some embodiments a PtIP-83 polypeptide comprises an amino acid sequence MOTIF selected from: an amino acid sequence MOTIF 1 having at least 90% sequence identity to the amino acid sequence as represented by the formula MP[DE]MP[ST][ED]ADWSIFVNE[IVL]EAVAEGMPTEVSEVP[AV]W[KR]AKCKN[MV]AA LGREM[SC]I (SEQ ID NO: 670); an amino acid sequence MOTIF 2 having at least 90% sequence identity to the amino acid sequence as represented by the formula PQLQYRMYG[NS]LI[KRN]QMAQVAQNYD[QR][ED]FK[QR][FL][KR]LFI[IAVL]QNQI[LF]GSYLL[QE]QN[KR]AF (SEQ ID NO: 671); an amino acid sequence MOTIF 3 having at least 90% sequence identity to the amino acid sequence as represented by the formula N[TK]FMQMTPFT[RH]WRLRLSASA[SPKA]EN[AK][EG]LAFPTATA[PL]DSTT[EQ][IV][V A]ITFHVTAIR (SEQ ID NO: 672); an amino acid sequence MOTIF 4 having at least 90% sequence identity to the amino acid sequence as represented by the formula [DN]FTSRHVVK[GD]IPV[SN]LLLDG[EG]DWEFEIPVQ[AG]GMSSFP (SEQ ID NO: 673); an amino acid sequence MOTIF 5 having at least 90% sequence identity to the amino acid sequence as represented by the formula IIHQP[SA]T[RQ][ST]G[IT][VI]YILLQGST[IV]FHDRRR[DE][EQ]V[ML]T[FP]QAA[DAV]PL N[FY][QH]YAYRLDTG (SEQ ID NO: 674); an amino acid sequence MOTIF 6 having at least 90% sequence identity to the amino acid sequence as represented by the formula S[HQ]ADRLAAIQP[AV][DN]LTN[HYF]LEMAT[HQ]MDMRTT[RS][MI]L[IL]GLLN[MI][LM]RIQNAAL[MR]YEY (SEQ ID NO: 675); an amino acid sequence MOTIF 7 having at least 90% sequence identity to the amino acid sequence as represented by the formula [VL]D[RQ]VEFSEVMVIHRMYV[N]RL[SA]DL[ND]V[GA][EQ]L[PE]GA[EG][RK]VKR[VL]Y V[FL]ADVVE (SEQ ID NO: 676); an amino acid sequence MOTIF 8 having at least 90% sequence identity to the amino acid sequence as represented by the formula A[DE]RELQMESFH[SA]AVISQ[RK]R[QGE]EL[ND][TD][AT][IF]AKM[DE]R[LM]SLQMEE E[NSD][RG]AMEQA[QR]KEM (SEQ ID NO: 677); an amino acid sequence MOTIF 9 having at least 90% sequence identity to the amino acid sequence as represented by the formula F[VL]TAGATAPGA[AV]ASAGQAV[SN]IAGQAAQ[AG]LRRVVEILE[GQ]LEAVMEVVAA[VI]K (SEQ ID NO: 678); an amino acid sequence MOTIF 10 having at least 90% sequence identity to the amino acid sequence as represented by the formula D[GD][MA][NK]WG[IT]Y[IV][YH][GA]E[KE]V[EQ][RVL]SPL[LYF][PN][SNG][NW][ASP][IY]L[AGV]V[WE]A[DQ]R[CS][TI]IT[SA]A[RFM]HN[HVT][VF][ND][AER]PG[RW][IV][IR](SEQ ID NO: 679); an amino acid sequence MOTIF 11 having at least 90% sequence identity to the amino acid sequence as represented by the formula [KV][VK][CA][RGC][PHY]PSP[DE][MIL][MV]SAV[AG][EV]HA[LIN]WL[NS][DK]VLL[QR]V VQ[KN]ES[QH][LM]QGT[AE][PSA]YNECLALLGR (SEQ ID NO: 680); an amino acid sequence MOTIF 12 having at least 90% sequence identity to the amino acid sequence as represented by the formula [PN]T[EQ]LT[VAT]WPL[GR]MDTV[AG][ND]LLI[AT][QH]E[NS]AAL[VLS]GL[ITMA]QLG[P Q][SP]S (SEQ ID NO: 681); an amino acid sequence MOTIF 13 having at least 90% sequence identity to the amino acid sequence as represented by the formula [RLC][DLWK][QNPR][MTP][HQR][MIL]PGSVTVI[IV]LCRLLQFP[IT][DG]G[SR][QFR][AS][TAD][TW](SEQ ID NO: 682); an amino acid sequence MOTIF 14 having at least 90% sequence identity to the amino acid sequence as represented by the formula [TA][SGV][IL]PV[ED]VVTDP[SN]IL[LM]GMQT[TS]V[LH]IAEL (SEQ ID NO: 683); an amino acid sequence MOTIF 15 having at least 90% sequence identity to the amino acid sequence as represented by the formula EGLR[EQ]FQN[RE]QVA[RN]A[VL]FAVL[KS][AS]VA[MQ]I[AG](SEQ ID NO: 684); an amino acid sequence MOTIF 16 having at least 90% sequence identity to the amino acid sequence as represented by the formula W[TS]RVRIRHLEM[QH]F[AV][QK]E[AS][SM][GN](SEQ ID NO: 685); an amino acid sequence MOTIF 17 having at least 90% sequence identity to the amino acid sequence as represented by the formula Q[IM]S[EQ]LQY[ED]IWVQG[LM][ML]RD[IM]A (SEQ ID NO: 686); an amino acid sequence MOTIF 18 having at least 90% sequence identity to the amino acid sequence as represented by the formula TFTLGSGVTGITSMHGEPSLDPWNGVSLDSASPTAF (SEQ ID NO: 663); an amino acid sequence MOTIF 19 having at least 90% sequence identity to the amino acid sequence as represented by the formula [MLV]DY[SK][TSK]L[YF][RE]DLNQIS (SEQ ID NO: 687); an amino acid sequence MOTIF 20 having at least 90% sequence identity to the amino acid sequence as represented by the formula L[RHQ]L[PT]FM[QK]LHA[RIT][VQL][IR]E[QER][NF][VR][KWS][SE](SEQ ID NO: 688); an amino acid sequence MOTIF 21 having at least 90% sequence identity to the amino acid sequence as represented by the formula V[DN][SA]L[ED]QV[GS][QH][IL]V[GD]AP (SEQ ID NO: 689); an amino acid sequence MOTIF 22 having at least 90% sequence identity to the amino acid sequence as represented by the formula [IV][EQH][CAS][VA][MI]K[IM][GV][RP][FI][VG][SL]VV (SEQ ID NO: 690); an amino acid sequence MOTIF 23 having at least 90% sequence identity to the amino acid sequence as represented by the formula TLTN[EQ]PSE[EQDH]F (SEQ ID NO: 691); and an amino acid sequence MOTIF 24 having at least 90% sequence identity to the amino acid sequence as represented by the formula LP[RS]QS[RT]N[IV]SF (SEQ ID NO: 692).

[0175] In some embodiments a PtIP-83 polypeptide comprises an amino acid sequence MOTIF selected from: an amino acid sequence MOTIF 1 as represented by an amino acid sequence of the formula MP[DE]MP[ST][ED]ADWSIFVNE[IVL]EAVAEGMPTEVSEVP[AVIL]W[KR]AKCKN[MVIL]AALGREM[SCT]I (SEQ ID NO: 693); an amino acid sequence MOTIF 2 as represented by an amino acid sequence of the formula PQLQYRMYG[NS]LI[KRNQ]QMAQVAQNYD[QRNK][ED]FK[QRNK][FL][KR]LFI[IAVL]Q NQI[LFIV]GSYLL[QEND]QN[KR]AF (SEQ ID NO: 694); an amino acid sequence MOTIF 3 as represented by an amino acid sequence of the formula N[TKSR]FMQMTPFT[RHK]WRLRLSASA[SPKATR]EN[AKR][EG]LAFPTATA[PLIV]DST T[EQND][IVL][VAIL]ITFHVTAIR (SEQ ID NO: 695); an amino acid sequence MOTIF 4 as represented by an amino acid sequence of the formula [DNQE]FTSRHVVK[GDE]IPV[SNTQ]LLLDG[EGD]DWEFEIPVQ[AG]GMSSFP (SEQ ID NO: 696); an amino acid sequence MOTIF 5 as represented by an amino acid sequence of the formula IIHQP[SAT]T[RQKN][ST]G[ITLVS][VIL]YILLQGST[IVL]FHDRRR[DE][EQDN]V[MLIV]T[F P]QAA[DAVEIL]PLN[FY][QHN]YAYRLDTG (SEQ ID NO: 697); an amino acid sequence MOTIF 6 as represented by an amino acid sequence of the formula S[HQN]ADRLAAIQP[AVIL][DN]LTN[HYF]LEMAT[HQN]MDMRTT[RSKT][MILV]L[ILV]GL LN[MILV][LMIV]RIQNAAL[MRILVK]YEY (SEQ ID NO: 698); an amino acid sequence MOTIF 7 as represented by an amino acid sequence of the formula [VLI]D[RQKN]VEFSEVMVIHRMYV[N]RL[SAT]DL[NDQE]V[GA][EQND]L[PED]GA[EGD][RK]VKR[VLI]YV[FLIV]ADVVE (SEQ ID NO: 699); an amino acid sequence MOTIF 8 as represented by an amino acid sequence of the formula A[DE]RELQMESFH[SAT]AVISQ[RK]R[QGEND]EL[NDQE][TDSE][ATS][IFLV]AKM[DE]R[LMIV]SLQMEEE[NSDQET][RGK]AMEQA[QRNK]KEM (SEQ ID NO: 700); an amino acid sequence MOTIF 9 as represented by an amino acid sequence of the formula F[VLI]TAGATAPGA[AVIL]ASAGQAV[SNTQ]IAGQAAQ[AG]LRRVVEILE[GQN]LEAVME VVAA[VIL]K (SEQ ID NO: 701); an amino acid sequence MOTIF 10 as represented by an amino acid sequence of the formula D[GDE][MA][NKQK]WG[ITLVS]Y[IVL][YH][GA]E[KERD]V[EQND][RVLKI]SPL[LYFIV][P NQ][SNGTQ][NWQ][ASPT][IYLV]L[AGVIL]V[WED]A[DQNE]R[CST][TISLV]IT[SAT]A[RF MK]HN[HVTILS][VFIL][NDQE][AERDK]PG[RWK][IVL][IRLVK](SEQ ID NO: 702); an amino acid sequence MOTIF 11 as represented by an amino acid sequence of the formula [KVRIL][VKRIL][CA][RGCK][PHY]PSP[DE][MILV][MVIL]SAV[AG][EVDIL]HA[LINVQ]WL[NSQT][DKER]VLL[QRNK]VVQ[KNRQ]ES[QHN][LMIV]QGT[AED][PSAT]YNECLALLGR (SEQ ID NO: 703); an amino acid sequence MOTIF 12 as represented by an amino acid sequence of the formula [PNQ]T[EQDN]LT[VATILS]WPL[GRK]MDTV[AG][NDQE]LLI[ATS][QHN]E[NSQT]AAL[V LSIT]GL[ITMALVS]QLG[PQN][SPT]S (SEQ ID NO: 704); an amino acid sequence MOTIF 13 as represented by an amino acid sequence of the formula [RLCKIV][DLWKEIVR][QNPRK][MTP][HQR][MILV]PGSVTVI[IVL]LCRLLQFP[ITLVS][D GE]G[SRTK][QFRNK][AST][TADES][TWS](SEQ ID NO: 705); an amino acid sequence MOTIF 14 as represented by an amino acid sequence of the formula [TA][SGVTIL][ILV]PV[ED]VVTDP[SNTQ]IL[LMIV]GMQT[TS]V[LHIV]IAEL (SEQ ID NO: 706); an amino acid sequence MOTIF 15 as represented by an amino acid sequence of the formula EGLR[EQND]FQN[REKD]QVA[RNKQ]A[VLI]FAVL[KSRT][AST]VA[MQN]I[AG](SEQ ID NO: 707); an amino acid sequence MOTIF 16 as represented by an amino acid sequence of the formula W[TS]RVRIRHLEM[QHN]F[AVIL][QKNR]E[AST][SMT][GNQ](SEQ ID NO: 708); an amino acid sequence MOTIF 17 as represented by an amino acid sequence of the formula Q[IMLV]S[EQND]LQY[ED]IWVQG[LMIV][MLIV]RD[IMLV]A (SEQ ID NO: 709); an amino acid sequence MOTIF 18 as represented by an amino acid sequence of the formula TFTLGSGVTGITSMHGEPSLDPWNGVSLDSASPTAF (SEQ ID NO: 663); an amino acid sequence MOTIF 19 as represented by an amino acid sequence of the formula [MLVI]DY[SKTR][TSKR]L[YF][REKD]DLNQIS (SEQ ID NO: 710); an amino acid sequence MOTIF 20 as represented by an amino acid sequence of the formula L[RHQKN]L[PTS]FM[QKNR]LHA[RITKLVS][VQLIN][IRLVK]E[QERNDK][NFQ][VRILK][K WSRT][SETD](SEQ ID NO: 711); an amino acid sequence MOTIF 21 as represented by an amino acid sequence of the formula V[DNQE][SAT]L[ED]QV[GST][QHN][ILV]V[GDE]AP (SEQ ID NO: 712); an amino acid sequence MOTIF 22 as represented by an amino acid sequence of the formula [IVL][EQHND][CAST][VAIL][MILV]K[IMLV][GVIL][RPK][FILV][VGIL][SLTIV]VV (SEQ ID NO: 713); an amino acid sequence MOTIF 23 as represented by an amino acid sequence of the formula TLTN[EQDN]PSE[EQDHN]F (SEQ ID NO: 714); and an amino acid sequence MOTIF 24 as represented by an amino acid sequence of the formula LP[RSKT]QS[RTKS]N[IVL]SF (SEQ ID NO: 715).

[0176] In some embodiments a PtIP-83 polypeptide comprises an amino acid sequence MOTIF selected from: an amino acid sequence MOTIF 1 having at least 90% sequence identity to the amino acid sequence as represented by the formula MP[DE]MP[ST][ED]ADWSIFVNE[IVL]EAVAEGMPTEVSEVP[AVIL]W[KR]AKCKN[MVIL]AALGREM[SCT]I (SEQ ID NO: 693); an amino acid sequence MOTIF 2 having at least 90% sequence identity to the amino acid sequence as represented by the formula PQLQYRMYG[NS]LI[KRNQ]QMAQVAQNYD[QRNK][ED]FK[QRNK][FL][KR]LFI[IAVL]Q NQI[LFIV]GSYLL[QEND]QN[KR]AF (SEQ ID NO: 694); an amino acid sequence MOTIF 3 having at least 90% sequence identity to the amino acid sequence as represented by the formula N[TKSR]FMQMTPFT[RHK]WRLRLSASA[SPKATR]EN[AKR][EG]LAFPTATA[PLIV]DST T[EQND][IVL][VAIL]ITFHVTAIR (SEQ ID NO: 695); an amino acid sequence MOTIF 4 having at least 90% sequence identity to the amino acid sequence as represented by the formula [DNQE]FTSRHVVK[GDE]IPV[SNTQ]LLLDG[EGD]DWEFEIPVQ[AG]GMSSFP (SEQ ID NO: 696); an amino acid sequence MOTIF 5 having at least 90% sequence identity to the amino acid sequence as represented by the formula IIHQP[SAT]T[RQKN][ST]G[ITLVS][VIL]YILLQGST[IVL]FHDRRR[DE][EQDN]V[MLIV]T[F P]QAA[DAVEIL]PLN[FY][QHN]YAYRLDTG (SEQ ID NO: 697); an amino acid sequence MOTIF 6 having at least 90% sequence identity to the amino acid sequence as represented by the formula S[HQN]ADRLAAIQP[AVIL][DN]LTN[HYF]LEMAT[HQN]MDMRTT[RSKT][MILV]L[ILV]GL LN[MILV][LMIV]RIQNAAL[MRILVK]YEY (SEQ ID NO: 698); an amino acid sequence MOTIF 7 having at least 90% sequence identity to the amino acid sequence as represented by the formula [VLI]D[RQKN]VEFSEVMVIHRMYV[N]RL[SAT]DL[NDQE]V[GA][EQND]L[PED]GA[EGD][RK]VKR[VLI]YV[FLIV]ADVVE (SEQ ID NO: 699); an amino acid sequence MOTIF 8 having at least 90% sequence identity to the amino acid sequence as represented by the formula A[DE]RELQMESFH[SAT]AVISQ[RK]R[QGEND]EL[NDQE][TDSE][ATS][IFLV]AKM[DE]R[LMIV]SLQMEEE[NSDQET][RGK]AMEQA[QRNK]KEM (SEQ ID NO: 700); an amino acid sequence MOTIF 9 having at least 90% sequence identity to the amino acid sequence as represented by the formula F[VLI]TAGATAPGA[AVIL]ASAGQAV[SNTQ]IAGQAAQ[AG]LRRVVEILE[GQN]LEAVME VVAA[VIL]K (SEQ ID NO: 701); an amino acid sequence MOTIF 10 having at least 90% sequence identity to the amino acid sequence as represented by the formula D[GDE][MA][NKQK]WG[ITLVS]Y[IVL][YH][GA]E[KERD]V[EQND][RVLKI]SPL[LYFIV][P NQ][SNGTQ][NWQ][ASPT][IYLV]L[AGVIL]V[WED]A[DQNE]R[CST][TISLV]IT[SAT]A[RF MK]HN[HVTILS][VFIL][NDQE][AERDK]PG[RWK][IVL][IRLVK](SEQ ID NO: 702); an amino acid sequence MOTIF 11 having at least 90% sequence identity to the amino acid sequence as represented by the formula [KVRIL][VKRIL][CA][RGCK][PHY]PSP[DE][MILV][MVIL]SAV[AG][EVDIL]HA[LINVQ]WL[NSQT][DKER]VLL[QRNK]VVQ[KNRQ]ES[QHN][LMIV]QGT[AED][PSAT]YNECLALLGR (SEQ ID NO: 703); an amino acid sequence MOTIF 12 having at least 90% sequence identity to the amino acid sequence as represented by the formula [PNQ]T[EQDN]LT[VATILS]WPL[GRK]MDTV[AG][NDQE]LLI[ATS][QHN]E[NSQT]AAL[V LSIT]GL[ITMALVS]QLG[PQN][SPT]S (SEQ ID NO: 704); an amino acid sequence MOTIF 13 having at least 90% sequence identity to the amino acid sequence as represented by the formula [RLCKIV][DLWKEIVR][QNPRK][MTP][HQR][MILV]PGSVTVI[IVL]LCRLLQFP[ITLVS][D GE]G[SRTK][QFRNK][AST][TADES][TWS](SEQ ID NO: 705); an amino acid sequence MOTIF 14 having at least 90% sequence identity to the amino acid sequence as represented by the formula [TA][SGVTIL][ILV]PV[ED]VVTDP[SNTQ]IL[LMIV]GMQT[TS]V[LHIV]IAEL (SEQ ID NO: 706); an amino acid sequence MOTIF 15 having at least 90% sequence identity to the amino acid sequence as represented by the formula EGLR[EQND]FQN[REKD]QVA[RNKQ]A[VLI]FAVL[KSRT][AST]VA[MQN]I[AG](SEQ ID NO: 707); an amino acid sequence MOTIF 16 having at least 90% sequence identity to the amino acid sequence as represented by the formula W[TS]RVRIRHLEM[QHN]F[AVIL][QKNR]E[AST][SMT][GNQ](SEQ ID NO: 708); an amino acid sequence MOTIF 17 having at least 90% sequence identity to the amino acid sequence as represented by the formula Q[IMLV]S[EQND]LQY[ED]IWVQG[LMIV][MLIV]RD[IMLV]A (SEQ ID NO: 709); an amino acid sequence MOTIF 18 having at least 90% sequence identity to the amino acid sequence as represented by the formula TFTLGSGVTGITSMHGEPSLDPWNGVSLDSASPTAF (SEQ ID NO: 663); an amino acid sequence MOTIF 19 having at least 90% sequence identity to the amino acid sequence as represented by the formula [MLVI]DY[SKTR][TSKR]L[YF][REKD]DLNQIS (SEQ ID NO: 710); an amino acid sequence MOTIF 20 having at least 90% sequence identity to the amino acid sequence as represented by the formula L[RHQKN]L[PTS]FM[QKNR]LHA[RITKLVS][VQLIN][IRLVK]E[QERNDK][NFQ][VRILK][K WSRT][SETD](SEQ ID NO: 711); an amino acid sequence MOTIF 21 having at least 90% sequence identity to the amino acid sequence as represented by the formula V[DNQE][SAT]L[ED]QV[GST][QHN][ILV]V[GDE]AP (SEQ ID NO: 712); an amino acid sequence MOTIF 22 having at least 90% sequence identity to the amino acid sequence as represented by the formula [IVL][EQHND][CAST][VAIL][MILV]K[IMLV][GVIL][RPK][FILV][VGIL][SLTIV]VV (SEQ ID NO: 713); an amino acid sequence MOTIF 23 having at least 90% sequence identity to the amino acid sequence as represented by the formula TLTN[EQDN]PSE[EQDHN]F (SEQ ID NO: 714); and an amino acid sequence MOTIF 24 having at least 90% sequence identity to the amino acid sequence as represented by the formula LP[RSKT]QS[RTKS]N[IVL]SF (SEQ ID NO: 715).

[0177] In some embodiment a PtIP-83 polypeptide comprises, sequentially from the N-terminus to the C-terminus, an amino acid sequence MOTIF selected from: MOTIF 19 (SEQ ID NO: 664, SEQ ID NO: 687 or SEQ ID NO: 710), MOTIF 7 (SEQ ID NO: 652, SEQ ID NO: 676 or SEQ ID NO: 699), MOTIF 13 (SEQ ID NO: 658, SEQ ID NO: 682 or SEQ ID NO: 705), MOTIF 20 (SEQ ID NO: 665, SEQ ID NO: 688 or SEQ ID NO: 711), MOTIF 10 (SEQ ID NO: 655, SEQ ID NO: 679 or SEQ ID NO: 702), MOTIF 18 (SEQ ID NO: 663), MOTIF 24 (SEQ ID NO: 669, SEQ ID NO: 692 or SEQ ID NO: 715), MOTIF 14 (SEQ ID NO: 659, SEQ ID NO: 683 or SEQ ID NO: 706), MOTIF 11 (SEQ ID NO: 656, SEQ ID NO: 680 or SEQ ID NO: 703), MOTIF 22 (SEQ ID NO: 667, SEQ ID NO: 690 or SEQ ID NO: 713), MOTIF 2 (SEQ ID NO: 647, SEQ ID NO: 671 or SEQ ID NO: 694), MOTIF 8 (SEQ ID NO: 653, SEQ ID NO: 677 or SEQ ID NO: 700), MOTIF 15 (SEQ ID NO: 660, SEQ ID NO: 684 or SEQ ID NO: 707), MOTIF 9 (SEQ ID NO: 654, SEQ ID NO: 678 or SEQ ID NO: 701), MOTIF 21 (SEQ ID NO: 666, SEQ ID NO: 689 or SEQ ID NO: 712), MOTIF 1 (SEQ ID NO: 646, SEQ ID NO: 670 or SEQ ID NO: 693), MOTIF 17 (SEQ ID NO: 662, SEQ ID NO: 686 or SEQ ID NO: 709), MOTIF 6 (SEQ ID NO: 651, SEQ ID NO: 675 or SEQ ID NO: 698), MOTIF 12 (SEQ ID NO: 657, SEQ ID NO: 681 or SEQ ID NO: 704), MOTIF 4 (SEQ ID NO: 649, SEQ ID NO: 673 or SEQ ID NO: 696), MOTIF 16 (SEQ ID NO: 661, SEQ ID NO: 685 or SEQ ID NO: 708), MOTIF 5 (SEQ ID NO: 650, SEQ ID NO: 674 or SEQ ID NO: 697), MOTIF 23 (SEQ ID NO: 668, SEQ ID NO: 691 or SEQ ID NO: 714), and MOTIF 3 (SEQ ID NO: 648, SEQ ID NO: 672 or SEQ ID NO: 695).

[0178] In some embodiments a PtIP-83 polypeptide comprises, sequentially from the N-terminus to the C-terminus, an amino acid sequence MOTIF selected from: MOTIF 19 (SEQ ID NO: 664, SEQ ID NO: 687 or SEQ ID NO: 710), MOTIF 7 (SEQ ID NO: 652, SEQ ID NO: 676 or SEQ ID NO: 699), MOTIF 13 (SEQ ID NO: 658, SEQ ID NO: 682 or SEQ ID NO: 705), MOTIF 20 (SEQ ID NO: 665, SEQ ID NO: 688 or SEQ ID NO: 711), MOTIF 14 (SEQ ID NO: 659, SEQ ID NO: 683 or SEQ ID NO: 706), MOTIF 2 (SEQ ID NO: 647, SEQ ID NO: 671 or SEQ ID NO: 694), MOTIF 8 (SEQ ID NO: 653, SEQ ID NO: 677 or SEQ ID NO: 700), MOTIF 15 (SEQ ID NO: 660, SEQ ID NO: 684 or SEQ ID NO: 707), MOTIF 9 (SEQ ID NO: 654, SEQ ID NO: 678 or SEQ ID NO: 701), MOTIF 21 (SEQ ID NO: 666, SEQ ID NO: 689 or SEQ ID NO: 712), MOTIF 1 (SEQ ID NO: 646, SEQ ID NO: 670 or SEQ ID NO: 693), MOTIF 17 (SEQ ID NO: 662, SEQ ID NO: 686 or SEQ ID NO: 709), MOTIF 6 (SEQ ID NO: 651, SEQ ID NO: 675 or SEQ ID NO: 698), MOTIF 12 (SEQ ID NO: 657, SEQ ID NO: 681 or SEQ ID NO: 704), MOTIF 4 (SEQ ID NO: 649, SEQ ID NO: 673 or SEQ ID NO: 696), MOTIF 16 (SEQ ID NO: 661, SEQ ID NO: 685 or SEQ ID NO: 708), MOTIF 5 (SEQ ID NO: 650, SEQ ID NO: 674 or SEQ ID NO: 697), MOTIF 23 (SEQ ID NO: 668, SEQ ID NO: 691 or SEQ ID NO: 714), and MOTIF 3 (SEQ ID NO: 648, SEQ ID NO: 672 or SEQ ID NO: 695).

[0179] In some embodiments a PtIP-83 polypeptide comprises, sequentially from the N-terminus to the C-terminus, the amino acid sequence MOTIFs: MOTIF 19 (SEQ ID NO: 664, SEQ ID NO: 687 or SEQ ID NO: 710), MOTIF 7 (SEQ ID NO: 652, SEQ ID NO: 676 or SEQ ID NO: 699), MOTIF 13 (SEQ ID NO: 658, SEQ ID NO: 682 or SEQ ID NO: 705), MOTIF 20 (SEQ ID NO: 665, SEQ ID NO: 688 or SEQ ID NO: 711), MOTIF 10 (SEQ ID NO: 655, SEQ ID NO: 679 or SEQ ID NO: 702), MOTIF 18 (SEQ ID NO: 663), MOTIF 24 (SEQ ID NO: 669, SEQ ID NO: 692 or SEQ ID NO: 715), MOTIF 14 (SEQ ID NO: 659, SEQ ID NO: 683 or SEQ ID NO: 706), MOTIF 11 (SEQ ID NO: 656, SEQ ID NO: 680 or SEQ ID NO: 703), MOTIF 22 (SEQ ID NO: 667, SEQ ID NO: 690 or SEQ ID NO: 713), MOTIF 2 (SEQ ID NO: 647, SEQ ID NO: 671 or SEQ ID NO: 694), MOTIF 8 (SEQ ID NO: 653, SEQ ID NO: 677 or SEQ ID NO: 700), MOTIF 15 (SEQ ID NO: 660, SEQ ID NO: 684 or SEQ ID NO: 707), MOTIF 9 (SEQ ID NO: 654, SEQ ID NO: 678 or SEQ ID NO: 701), MOTIF 21 (SEQ ID NO: 666, SEQ ID NO: 689 or SEQ ID NO: 712), MOTIF 1 (SEQ ID NO: 646, SEQ ID NO: 670 or SEQ ID NO: 693), MOTIF 17 (SEQ ID NO: 662, SEQ ID NO: 686 or SEQ ID NO: 709), MOTIF 6 (SEQ ID NO: 651, SEQ ID NO: 675 or SEQ ID NO: 698), MOTIF 12 (SEQ ID NO: 657, SEQ ID NO: 681 or SEQ ID NO: 704), MOTIF 4 (SEQ ID NO: 649, SEQ ID NO: 673 or SEQ ID NO: 696), MOTIF 16 (SEQ ID NO: 661, SEQ ID NO: 685 or SEQ ID NO: 708), MOTIF 5 (SEQ ID NO: 650, SEQ ID NO: 674 or SEQ ID NO: 697), MOTIF 23 (SEQ ID NO: 668, SEQ ID NO: 691 or SEQ ID NO: 714), and MOTIF 3 (SEQ ID NO: 648, SEQ ID NO: 672 or SEQ ID NO: 695).

[0180] In some embodiments a PtIP-83 polypeptide comprises, sequentially from the N-terminus to the C-terminus, the amino acid sequence MOTIFs: MOTIF 19 (SEQ ID NO: 664, SEQ ID NO: 687 or SEQ ID NO: 710), MOTIF 7 (SEQ ID NO: 652, SEQ ID NO: 676 or SEQ ID NO: 699), MOTIF 13 (SEQ ID NO: 658, SEQ ID NO: 682 or SEQ ID NO: 705), MOTIF 20 (SEQ ID NO: 665, SEQ ID NO: 688 or SEQ ID NO: 711), MOTIF 14 (SEQ ID NO: 659, SEQ ID NO: 683 or SEQ ID NO: 706), MOTIF 2 (SEQ ID NO: 647, SEQ ID NO: 671 or SEQ ID NO: 694), MOTIF 8 (SEQ ID NO: 653, SEQ ID NO: 677 or SEQ ID NO: 700), MOTIF 15 (SEQ ID NO: 660, SEQ ID NO: 684 or SEQ ID NO: 707), MOTIF 9 (SEQ ID NO: 654, SEQ ID NO: 678 or SEQ ID NO: 701), MOTIF 21 (SEQ ID NO: 666, SEQ ID NO: 689 or SEQ ID NO: 712), MOTIF 1 (SEQ ID NO: 646, SEQ ID NO: 670 or SEQ ID NO: 693), MOTIF 17 (SEQ ID NO: 662, SEQ ID NO: 686 or SEQ ID NO: 709), MOTIF 6 (SEQ ID NO: 651, SEQ ID NO: 675 or SEQ ID NO: 698), MOTIF 12 (SEQ ID NO: 657, SEQ ID NO: 681 or SEQ ID NO: 704), MOTIF 4 (SEQ ID NO: 649, SEQ ID NO: 673 or SEQ ID NO: 696), MOTIF 16 (SEQ ID NO: 661, SEQ ID NO: 685 or SEQ ID NO: 708), MOTIF 5 (SEQ ID NO: 650, SEQ ID NO: 674 or SEQ ID NO: 697), MOTIF 23 (SEQ ID NO: 668, SEQ ID NO: 691 or SEQ ID NO: 714), and MOTIF 3 (SEQ ID NO: 648, SEQ ID NO: 672 or SEQ ID NO: 695).

[0181] In some embodiments a PtIP-83 polypeptide comprises, sequentially from the N-terminus to the C-terminus: a Region A of between about 200 to about 300 amino acids in length comprising an amino acid sequence MOTIF of: MOTIF 19 (SEQ ID NO: 664, SEQ ID NO: 687 or SEQ ID NO: 710), MOTIF 7 (SEQ ID NO: 652, SEQ ID NO: 676 or SEQ ID NO: 699), MOTIF 13 (SEQ ID NO: 658, SEQ ID NO: 682 or SEQ ID NO: 705), MOTIF 20 (SEQ ID NO: 665, SEQ ID NO: 688 or SEQ ID NO: 711), MOTIF 10 (SEQ ID NO: 655, SEQ ID NO: 679 or SEQ ID NO: 702), MOTIF 18 (SEQ ID NO: 663), MOTIF 24 (SEQ ID NO: 669, SEQ ID NO: 692 or SEQ ID NO: 715), and/or MOTIF 14 having a predominantly nonconserved secondary structure; a Region B of between about 380 to about 465 amino acids in length comprising an amino acid sequence MOTIF of MOTIF 22 (SEQ ID NO: 667, SEQ ID NO: 690 or SEQ ID NO: 713), MOTIF 2 (SEQ ID NO: 647, SEQ ID NO: 671 or SEQ ID NO: 694), MOTIF 8 (SEQ ID NO: 653, SEQ ID NO: 677 or SEQ ID NO: 700), MOTIF 15 (SEQ ID NO: 660, SEQ ID NO: 684 or SEQ ID NO: 707), MOTIF 9 (SEQ ID NO: 654, SEQ ID NO: 678 or SEQ ID NO: 701), MOTIF 21 (SEQ ID NO: 666, SEQ ID NO: 689 or SEQ ID NO: 712), MOTIF 1 (SEQ ID NO: 646, SEQ ID NO: 670 or SEQ ID NO: 693), MOTIF 17 (SEQ ID NO: 662, SEQ ID NO: 686 or SEQ ID NO: 709), MOTIF 6 (SEQ ID NO: 651, SEQ ID NO: 675 or SEQ ID NO: 698), and/or MOTIF 12 and having a predominately alpha helical structure; and a Region C of between about 150 to about 180 amino acids in length comprising an amino acid sequence MOTIF of MOTIF 16 (SEQ ID NO: 661, SEQ ID NO: 685 or SEQ ID NO: 708), MOTIF 5 (SEQ ID NO: 650, SEQ ID NO: 674 or SEQ ID NO: 697), MOTIF 23 (SEQ ID NO: 668, SEQ ID NO: 691 or SEQ ID NO: 714), and/or MOTIF 3 having a consensus secondary structure comprising predominately beta strand structure.

[0182] In some embodiments a PtIP-83 polypeptide comprises sequentially from the N-terminus to the C-terminus: a Region A of between about 200 to about 300 amino acids in length having predominantly a nonconserved secondary structure; a Region B of between about 380 to about 465 amino acids in length having a consensus secondary structure comprising 8 to 10 segments of predominately alpha helical structure; and a Region C of between about 150 to about 180 amino acids in length having a consensus secondary structure comprising 6 to 8 segments of predominately beta strand structure. As used herein “predominantly a nonconserved secondary structure” means that the regions of secondary structure don't consistently align within the family of PtIP polypeptides. As used herein “predominately alpha helical structure” means that secondary structure prediction may have one or more gap of between 1 to 4 amino acids of coil and/or beta strand structure intervening in the alpha helix structure. As used herein “predominately beta strand structure” means that secondary structure prediction may have a gap of between 1 to 4 amino acids of coil and/or alpha helix structure intervening in the beta strand structure. In some embodiments the secondary structure is generated by the PSIPRED, top ranked secondary structure prediction method (Jones D T. (1999) J. Mol. Biol. 292: 195-202).

[0183] In some embodiments a PtIP-83 polypeptide comprises sequentially from the N-terminus to the C-terminus: a Region A of between about 200 to about 300 amino acids in length having a predominantly nonconserved secondary structure; a Region B of between about 380 to about 465 amino acids in length having a consensus secondary structure comprising nine segments of predominately alpha helical structure; and a Region C of between about 150 to about 180 amino acids in length having a consensus secondary structure comprising seven segments of predominately beta strand structure.

[0184] In some embodiments a PtIP-83 polypeptide comprises sequentially from the N-terminus to the C-terminus: a Region A of between about 200 to about 300 amino acids in length having a flexible consensus secondary structure, wherein the Region A comprises a conserved beta strand 1 (β1a) of between about 4 and about 12 amino acids in length within about amino acid residue 30 to about amino acid residue 130 from the N-terminus of the PtIP-83 polypeptide; a Region B of between about 380 to about 465 amino acids in length having a consensus secondary structure comprising nine segments of predominately alpha helical structure; and a Region C of between about 150 to about 180 amino acids in length having a consensus secondary structure comprising seven segments of predominately beta strand structure. As used herein, the term “about” when used in the context of the lower/upper limit of the length of a secondary structural element means the greater of −/+an integer of up to −/+20% of the length of the secondary structural element or −/+1 amino acid. By means of example, a secondary structure element of between about 3 amino acids and about 23 amino acids in length means a secondary structure element of between 2 and 27 amino acids in length.

[0185] In some embodiments a PtIP-83 polypeptide comprises sequentially from the N-terminus to the C-terminus: a Region A of between about 200 to about 300 amino acids in length having a flexible consensus secondary structure, wherein the Region A comprises a conserved beta strand 1 (β1a) of between about 4 and about 12 amino acids in length, a coil of between about 10 and and about 20 amino acids in length and a beta strand 2 (β1b) of between about 4 and about 12 amino acids in length, within about amino acid residue 30 to about amino acid residue 165 from the N-terminus of the PtIP-83 polypeptide; a Region B of between about 380 to about 465 amino acids in length having a consensus secondary structure comprising nine segments of predominately alpha helical structure; and a Region C of between about 150 to about 180 amino acids in length having a consensus secondary structure comprising seven segments of predominately beta strand structure.

[0186] In some embodiments a PtIP-83 polypeptide comprises sequentially from the N-terminus to the C-terminus: a Region A of between about 200 to about 300 amino acids in length having a predominantly nonconserved secondary structure; a Region B of between about 380 to about 465 amino acids in length having a consensus secondary structure comprising sequentially: i) an alpha helix-1 of between about 10 and about 26 amino acids in length; ii) a coil-1 of between about 2 and about 8 amino acids in length flanked by alpha helix-1 and alpha helix-2; iii) an alpha helix-2 of between about 15 and about 24 amino acids in length; iv) a coil-2 of between about 4 and about 14 amino acids in length flanked by alpha helix-2 and alpha helix-3; v) an alpha helix 3 of between about 15 and about 27 amino acids in length; vi) a coil-3 of between about 11 and about 13 amino acids in length flanked by alpha helix-3 and alpha helix-4; vii) an alpha helix-4 of about 180 amino acids in length; viii) a coil-4 of between about 4 and about 5 amino acids in length flanked by alpha helix-4 and alpha helix-5; ix) an alpha helix-5 of between about 50 and about 54 amino acids in length; x) a coil-5 of between about 11 and about 17 amino acids in length flanked by alpha helix-5 and alpha helix-6; xi) an alpha helix-6 of between about 15 and about 16 amino acids in length; xii) a coil-6 of between about 6 and about 9 amino acids in length flanked by alpha helix-6 and alpha helix-7; xiii) an alpha helix-7 of between about 49 and about 55 amino acids in length; xiv) a coil-7 of between about 3 and about 8 amino acids in length flanked by alpha helix-7 and alpha helix-8; xv) an alpha helix-8 of between about 33 and about 36 amino acids in length; xvi) a coil-8 of between about 14 and about 16 amino acids in length flanked by alpha helix-8 and alpha helix-9; xvii) an alpha helix-9 of between about 16 and about 23 amino acids in length; xviii) a coil-9 of between about 21 and about 28 amino acids in length flanked by alpha helix-9 and Region C; and a Region C of between about 150 to about 180 amino acids in length having a consensus secondary structure comprising seven segments of predominately beta strand structure.

[0187] In some embodiments a PtIP-83 polypeptide comprises sequentially from the N-terminus to the C-terminus: a Region A of between about 200 to about 300 amino acids in length having a predominantly nonconserved secondary structure; a Region B of between about 380 to about 465 amino acids in length having a consensus secondary structure comprising nine segments of predominately alpha helical structure; and a Region C of between about 150 to about 180 amino acids in length having a consensus secondary structure comprising sequentially: i) a beta strand-1 (β1) of between about 3 amino acids and about 5 amino acids in length; ii) a coil of between about 13 amino acids and about 17 amino acids in length; iii) a beta strand-2 (β2) of between about 7 amino acids and about 11 amino acids in length; iv) a coil of between about 17 amino acids and about 23 amino acids in length; v) a beta strand-3 (β3) of between about 5 amino acids and about 7 amino acids in length; vi) a coil of between about 12 amino acids and about 14 amino acids in length; vii) a beta strand-4 (β4) of between about 5 amino acids and about 6 amino acids in length; viii) a coil of between about 2 amino acids and about 7 amino acids in length; ix) a beta strand-5 (β5) of between about 5 amino acids and about 7 amino acids in length; x) a coil of between about 26 amino acids and about 28 amino acids in length; xi) a beta strand-6 (β6) of between about 5 amino acids and about 7 amino acids in length; xii) a coil of between about 16 amino acids and about 20 amino acids in length; and xiii) a beta strand-1 (β7) of between about 13 amino acids and about 17 amino acids in length.

[0188] In some embodiments a PtIP-83 polypeptide comprises sequentially from the N-terminus to the C-terminus: a Region A of between about 200 to about 300 amino acids in length having a predominantly nonconserved secondary structure; a Region B of between about 380 to about 465 amino acids in length having a consensus secondary structure comprising sequentially: i) an alpha helix-1 of between about 10 and about 26 amino acids in length; ii) a coil-1 of between about 2 and about 8 amino acids in length flanked by alpha helix-1 and alpha helix-2; iii) an alpha helix-2 of between about 15 and about 24 amino acids in length; iv) a coil-2 of between about 4 and about 14 amino acids in length flanked by alpha helix-2 and alpha helix-3; v) an alpha helix 3 of between about 15 and about 27 amino acids in length; vi) a coil-3 of between about 11 and about 13 amino acids in length flanked by alpha helix-3 and alpha helix-4; vii) an alpha helix-4 of about 24 180 amino acids in length; viii) a coil-4 of between about 4 and about 5 amino acids in length flanked by alpha helix-4 and alpha helix-5; ix) an alpha helix-5 of between about 50 and about 54 amino acids in length; x) a coil-5 of between about 11 and about 17 amino acids in length flanked by alpha helix-5 and alpha helix-6; xi) an alpha helix-6 of between about 15 and about 16 amino acids in length; xii) a coil-6 of between about 6 and about 9 amino acids in length flanked by alpha helix-6 and alpha helix-7; xiii) an alpha helix-7 of between about 49 and about 55 amino acids in length; xiv) a coil-7 of between about 3 and about 8 amino acids in length flanked by alpha helix-7 and alpha helix-8; xv) an alpha helix-8 of between about 33 and about 36 amino acids in length; xvi) a coil-8 of between about 14 and about 16 amino acids in length flanked by alpha helix-8 and alpha helix-9; xvii) an alpha helix-9 of between about 16 and about 23 amino acids in length; xviii) a coil-9 of between about 21 and about 28 amino acids in length flanked by alpha helix-9 and Region C; and a Region C of between about 150 to about 180 amino acids in length having a consensus secondary structure comprising sequentially: i) a beta strand-1 (β1) of between about 3 amino acids and about 5 amino acids in length; ii) a coil of between about 13 amino acids and about 17 amino acids in length; iii) a beta strand-2 (β2) of between about 7 amino acids and about 11 amino acids in length; iv) a coil of between about 17 amino acids and about 23 amino acids in length; v) a beta strand-3 (β3) of between about 5 amino acids and about 7 amino acids in length; vi) a coil of between about 12 amino acids and about 14 amino acids in length; vii) a beta strand-4 (β4) of between about 5 amino acids and about 6 amino acids in length; viii) a coil of between about 2 amino acids and about 7 amino acids in length; ix) a beta strand-5 (β5) of between about 5 amino acids and about 7 amino acids in length; x) a coil of between about 26 amino acids and about 28 amino acids in length; xi) a beta strand-6 (β6) of between about 5 amino acids and about 7 amino acids in length; xii) a coil of between about 16 amino acids and about 20 amino acids in length; and xiii) a beta strand-1 (β7) of between about 13 amino acids and about 17 amino acids in length.

[0189] In some embodiments a PtIP-83 polypeptide comprises sequentially from the N-terminus to the C-terminus: a Region A of between about 200 to about 300 amino acids in length having a flexible consensus secondary structure, wherein the Region A comprises a conserved beta strand 1 (β1a) of between about 4 and about 12 amino acids in length within about amino acid residue 30 to about amino acid residue 130 from the N-terminus of the PtIP-83 polypeptide; a Region B of between about 380 to about 465 amino acids in length having a consensus secondary structure comprising sequentially: i) an alpha helix-1 of between about 10 and about 26 amino acids in length; ii) a coil-1 of between about 2 and about 8 amino acids in length flanked by alpha helix-1 and alpha helix-2; iii) an alpha helix-2 of between about 15 and about 24 amino acids in length; iv) a coil-2 of between about 4 and about 14 amino acids in length flanked by alpha helix-2 and alpha helix-3; v) an alpha helix 3 of between about 15 and about 27 amino acids in length; vi) a coil-3 of between about 11 and about 13 amino acids in length flanked by alpha helix-3 and alpha helix-4; vii) an alpha helix-4 of about 24 180 amino acids in length; viii) a coil-4 of between about 4 and about 5 amino acids in length flanked by alpha helix-4 and alpha helix-5; ix) an alpha helix-5 of between about 50 and about 54 amino acids in length; x) a coil-5 of between about 11 and about 17 amino acids in length flanked by alpha helix-5 and alpha helix-6; xi) an alpha helix-6 of between about 15 and about 16 amino acids in length; xii) a coil-6 of between about 6 and about 9 amino acids in length flanked by alpha helix-6 and alpha helix-7; xiii) an alpha helix-7 of between about 49 and about 55 amino acids in length; xiv) a coil-7 of between about 3 and about 8 amino acids in length flanked by alpha helix-7 and alpha helix-8; xv) an alpha helix-8 of between about 33 and about 36 amino acids in length; xvi) a coil-8 of between about 14 and about 16 amino acids in length flanked by alpha helix-8 and alpha helix-9; xvii) an alpha helix-9 of between about 16 and about 23 amino acids in length; xviii) a coil-9 of between about 21 and about 28 amino acids in length flanked by alpha helix-9 and Region C; and a Region C of between about 150 to about 180 amino acids in length having a consensus secondary structure comprising sequentially: i) a beta strand-1 (β1) of between about 3 amino acids and about 5 amino acids in length; ii) a coil of between about 13 amino acids and about 17 amino acids in length; iii) a beta strand-2 (β2) of between about 7 amino acids and about 11 amino acids in length; iv) a coil of between about 17 amino acids and about 23 amino acids in length; v) a beta strand-3 (β3) of between about 5 amino acids and about 7 amino acids in length; vi) a coil of between about 12 amino acids and about 14 amino acids in length; vii) a beta strand-4 (β4) of between about 5 amino acids and about 6 amino acids in length; viii) a coil of between about 2 amino acids and about 7 amino acids in length; ix) a beta strand-5 (β5) of between about 5 amino acids and about 7 amino acids in length; x) a coil of between about 26 amino acids and about 28 amino acids in length; xi) a beta strand-6 (β6) of between about 5 amino acids and about 7 amino acids in length; xii) a coil of between about 16 amino acids and about 20 amino acids in length; and xiii) a beta strand-1 (β7) of between about 13 amino acids and about 17 amino acids in length.

[0190] In some embodiments a PtIP-83 polypeptide has a calculated molecular weight of between about 70kD and about 120kD, between about 75kD and about 110kD, and between about 80kD and about 105kD, and between about 85kD and about 105kD.

[0191] In some embodiments the PtIP-83 polypeptide has a modified physical property. As used herein, the term “physical property” refers to any parameter suitable for describing the physical-chemical characteristics of a protein. As used herein, “physical property of interest” and “property of interest” are used interchangeably to refer to physical properties of proteins that are being investigated and/or modified. Examples of physical properties include, but are not limited to net surface charge and charge distribution on the protein surface, net hydrophobicity and hydrophobic residue distribution on the protein surface, surface charge density, surface hydrophobicity density, total count of surface ionizable groups, surface tension, protein size and its distribution in solution, melting temperature, heat capacity, and second virial coefficient. Examples of physical properties also include, but are not limited to solubility, folding, stability, and digestibility. In some embodiments the PtIP-83 polypeptide has increased digestibility of proteolytic fragments in an insect gut. Models for digestion by simulated simulated gastric fluids are known to one skilled in the art (Fuchs, R. L. and J. D. Astwood. Food Technology 50: 83-88, 1996; Astwood, J. D., et al Nature Biotechnology 14:1269-1273, 1996; Fu T J et al J. Agric Food Chem. 50: 7154-7160, 2002).

[0192] In some embodiments variants include polypeptides that differ in amino acid sequence due to mutagenesis. Variant proteins encompassed by the disclosure are biologically active, that is they continue to possess the desired biological activity (i.e. pesticidal activity) of the native protein. In some embodiment the variant will have at least about 10%, at least about 30%, at least about 50%, at least about 70%, at least about 80% or more of the insecticidal activity of the native protein. In some embodiments, the variants may have improved activity over the native protein.

[0193] Bacterial genes quite often possess multiple methionine initiation codons in proximity to the start of the open reading frame. Often, translation initiation at one or more of these start codons will lead to generation of a functional protein. These start codons can include ATG codons. However, bacteria such as Bacillus sp. also recognize the codon GTG as a start codon, and proteins that initiate translation at GTG codons contain a methionine at the first amino acid. On rare occasions, translation in bacterial systems can initiate at a TTG codon, though in this event the TTG encodes a methionine. Furthermore, it is not often determined a priori which of these codons are used naturally in the bacterium. Thus, it is understood that use of one of the alternate methionine codons may also lead to generation of pesticidal proteins. These pesticidal proteins are encompassed in the present disclosure and may be used in the methods of the present disclosure. It will be understood that, when expressed in plants, it will be necessary to alter the alternate start codon to ATG for proper translation.

[0194] In another aspect the PtIP-83 polypeptide may be expressed as a precursor protein with an intervening sequence that catalyzes multi-step, post translational protein splicing. Protein splicing involves the excision of an intervening sequence from a polypeptide with the concomitant joining of the flanking sequences to yield a new polypeptide (Chong, et al., (1996) J. Biol. Chem., 271:22159-22168). This intervening sequence or protein splicing element, referred to as inteins, which catalyze their own excision through three coordinated reactions at the N-terminal and C-terminal splice junctions: an acyl rearrangement of the N-terminal cysteine or serine; a transesterfication reaction between the two termini to form a branched ester or thioester intermediate and peptide bond cleavage coupled to cyclization of the intein C-terminal asparagine to free the intein (Evans, et al., (2000) J. Biol. Chem., 275:9091-9094. The elucidation of the mechanism of protein splicing has led to a number of intein-based applications (Comb, et al., U.S. Pat. No. 5,496,714; Comb, et al., U.S. Pat. No. 5,834,247; Camarero and Muir, (1999) J. Amer. Chem. Soc. 121:5597-5598; Chong, et al., (1997) Gene 192:271-281, Chong, et al., (1998) Nucleic Acids Res. 26:5109-5115; Chong, et al., (1998) J. Biol. Chem. 273:10567-10577; Cotton, et al., (1999) J. Am. Chem. Soc. 121:1100-1101; Evans, et al., (1999) J. Biol. Chem. 274:18359-18363; Evans, et al., (1999) J. Biol. Chem. 274:3923-3926; Evans, et al., (1998) Protein Sci. 7:2256-2264; Evans, et al., (2000) J. Biol. Chem. 275:9091-9094; Iwai and Pluckthun, (1999) FEBS Lett. 459:166-172; Mathys, et al., (1999) Gene 231:1-13; Mills, et al., (1998) Proc. Natl. Acad. Sci. USA 95:3543-3548; Muir, et al., (1998) Proc. Natl. Acad. Sci. USA 95:6705-6710; Otomo, et al., (1999) Biochemistry 38:16040-16044; Otomo, et al., (1999) J. Biolmol. NMR 14:105-114; Scott, et al., (1999) Proc. Natl. Acad. Sci. USA 96:13638-13643; Severinov and Muir, (1998) J. Biol. Chem. 273:16205-16209; Shingledecker, et al., (1998) Gene 207:187-195; Southworth, et al., (1998) EMBO J. 17:918-926; Southworth, et al., (1999) Biotechniques 27:110-120; Wood, et al., (1999) Nat. Biotechnol. 17:889-892; Wu, et al., (1998a) Proc. Natl. Acad. Sci. USA 95:9226-9231; Wu, et al., (1998b) Biochim Biophys Acta 1387:422-432; Xu, et al., (1999) Proc. Natl. Acad. Sci. USA 96:388-393; Yamazaki, et al., (1998) J. Am. Chem. Soc., 120:5591-5592). For the application of inteins in plant transgenes, see, Yang, et al., (Transgene Res 15:583-593 (2006)) and Evans, et al., (Annu. Rev. Plant Biol. 56:375-392 (2005)).

[0195] In another aspect the PtIP-83 polypeptide may be encoded by two separate genes where the intein of the precursor protein comes from the two genes, referred to as a split-intein, and the two portions of the precursor are joined by a peptide bond formation. This peptide bond formation is accomplished by intein-mediated trans-splicing. For this purpose, a first and a second expression cassette comprising the two separate genes further code for inteins capable of mediating protein trans-splicing. By trans-splicing, the proteins and polypeptides encoded by the first and second fragments may be linked by peptide bond formation. Trans-splicing inteins may be selected from the nucleolar and organellar genomes of different organisms including eukaryotes, archaebacteria and eubacteria. Inteins that may be used for are listed at neb.com/neb/inteins.html, which can be accessed on the world-wide web using the “www” prefix). The nucleotide sequence coding for an intein may be split into a 5′ and a 3′ part that code for the 5′ and the 3′ part of the intein, respectively. Sequence portions not necessary for intein splicing (e.g. homing endonuclease domain) may be deleted. The intein coding sequence is split such that the 5′ and the 3′ parts are capable of trans-splicing. For selecting a suitable splitting site of the intein coding sequence, the considerations published by Southworth, et al., (1998) EMBO J. 17:918-926 may be followed. In constructing the first and the second expression cassette, the 5′ intein coding sequence is linked to the 3′ end of the first fragment coding for the N-terminal part of the PtIP-83 polypeptide and the 3′ intein coding sequence is linked to the 5′ end of the second fragment coding for the C-terminal part of the PtIP-83 polypeptide.

[0196] In general, the trans-splicing partners can be designed using any split intein, including any naturally-occurring or artificially-split split intein. Several naturally-occurring split inteins are known, for example: the split intein of the DnaE gene of Synechocystis sp. PCC6803 (see, Wu, et al., (1998) Proc Nati Acad Sci USA. 95(16):9226-31 and Evans, et al., (2000) J Biol Chem. 275(13):9091-4 and of the DnaE gene from Nostoc punctiforme (see, Iwai, et al., (2006) FEBS Lett. 580(7):1853-8). Non-split inteins have been artificially split in the laboratory to create new split inteins, for example: the artificially split Ssp DnaB intein (see, Wu, et al., (1998) Biochim Biophys Acta. 1387:422-32) and split Sce VMA intein (see, Brenzel, et al., (2006) Biochemistry. 45(6):1571-8) and an artificially split fungal mini-intein (see, Elleuche, et al., (2007) Biochem Biophys Res Commun. 355(3):830-4). There are also intein databases available that catalogue known inteins (see for example the online-database available at: bioinformatics.weizmann.ac.ilUpietrolinteins/Inteinstable.html, which can be accessed on the world-wide web using the “www” prefix).

[0197] Naturally-occurring non-split inteins may have endonuclease or other enzymatic activities that can typically be removed when designing an artificially-split split intein. Such mini-inteins or minimized split inteins are well known in the art and are typically less than 200 amino acid residues long (see, Wu, et al., (1998) Biochim Biophys Acta. 1387:422-32). Suitable split inteins may have other purification enabling polypeptide elements added to their structure, provided that such elements do not inhibit the splicing of the split intein or are added in a manner that allows them to be removed prior to splicing. Protein splicing has been reported using proteins that comprise bacterial intein-like (BIL) domains (see, Amitai, et al., (2003) Mol Microbiol. 47:61-73) and hedgehog (Hog) auto-processing domains (the latter is combined with inteins when referred to as the Hog/intein superfamily or HINT family (see, Dassa, et al., (2004) J Biol Chem. 279:32001-7) and domains such as these may also be used to prepare artificially-split inteins. In particular, non-splicing members of such families may be modified by molecular biology methodologies to introduce or restore splicing activity in such related species. Recent studies demonstrate that splicing can be observed when a N-terminal split intein component is allowed to react with a C-terminal split intein component not found in nature to be its “partner”; for example, splicing has been observed utilizing partners that have as little as 30 to 50% homology with the “natural” splicing partner (see, Dassa, et al., (2007) Biochemistry. 46(1):322-30). Other such mixtures of disparate split intein partners have been shown to be unreactive one with another (see, Brenzel, et al., (2006) Biochemistry. 45(6):1571-8). However, it is within the ability of a person skilled in the relevant art to determine whether a particular pair of polypeptides is able to associate with each other to provide a functional intein, using routine methods and without the exercise of inventive skill.

[0198] In another aspect the PtIP-83 polypeptide is a circular permuted variant. In certain embodiments the PtIP-83 polypeptide is a circular permuted variant of the polypeptide of SEQ ID NO: 1, SEQ ID NO: 3, SEQ ID NO: 5, SEQ ID NO: 7, SEQ ID NO: 9, SEQ ID NO: 11, SEQ ID NO: 13, SEQ ID NO: 15, SEQ ID NO: 17, SEQ ID NO: 19, SEQ ID NO: 21, SEQ ID NO: 23, SEQ ID NO: 716, SEQ ID NO: 754, SEQ ID NO: 755, SEQ ID NO: 756, SEQ ID NO: 757, SEQ ID NO: 758, SEQ ID NO: 759, SEQ ID NO: 760, SEQ ID NO: 761, SEQ ID NO: 762, SEQ ID NO: 763, SEQ ID NO: 764, SEQ ID NO: 765, SEQ ID NO: 766, SEQ ID NO: 767, SEQ ID NO: 768 or SEQ ID NO: 769.

[0199] The development of recombinant DNA methods has made it possible to study the effects of sequence transposition on protein folding, structure and function. The approach used in creating new sequences resembles that of naturally occurring pairs of proteins that are related by linear reorganization of their amino acid sequences (Cunningham, et al., (1979) Proc. Natl. Acad. Sci. U.S.A. 76:3218-3222; Teather and Erfle, (1990) J. Bacteriol. 172:3837-3841; Schimming, et al., (1992) Eur. J. Biochem. 204:13-19; Yamiuchi and Minamikawa, (1991) FEBS Lett. 260:127-130; MacGregor, et al., (1996) FEBS Lett. 378:263-266). The first in vitro application of this type of rearrangement to proteins was described by Goldenberg and Creighton (J. Mol. Biol. 165:407-413, 1983). In creating a circular permuted variant a new N-terminus is selected at an internal site (breakpoint) of the original sequence, the new sequence having the same order of amino acids as the original from the breakpoint until it reaches an amino acid that is at or near the original C-terminus. At this point the new sequence is joined, either directly or through an additional portion of sequence (linker), to an amino acid that is at or near the original N-terminus and the new sequence continues with the same sequence as the original until it reaches a point that is at or near the amino acid that was N-terminal to the breakpoint site of the original sequence, this residue forming the new C-terminus of the chain. The length of the amino acid sequence of the linker can be selected empirically or with guidance from structural information or by using a combination of the two approaches. When no structural information is available, a small series of linkers can be prepared for testing using a design whose length is varied in order to span a range from 0 to 50 Å and whose sequence is chosen in order to be consistent with surface exposure (hydrophilicity, Hopp and Woods, (1983) Mol. Immunol. 20:483-489; Kyte and Doolittle, (1982) J. Mol. Biol. 157:105-132; solvent exposed surface area, Lee and Richards, (1971) J. Mol. Biol. 55:379-400) and the ability to adopt the necessary conformation without deranging the configuration of the pesticidal polypeptide (conformationally flexible; Karplus and Schulz, (1985) Naturwissenschaften 72:212-213). Assuming an average of translation of 2.0 to 3.8 Å per residue, this would mean the length to test would be between 0 to 30 residues, with 0 to 15 residues being the preferred range. Exemplary of such an empirical series would be to construct linkers using a cassette sequence such as Gly-Gly-Gly-Ser repeated n times, where n is 1, 2, 3 or 4. Those skilled in the art will recognize that there are many such sequences that vary in length or composition that can serve as linkers with the primary consideration being that they be neither excessively long nor short (cf., Sandhu, (1992) Critical Rev. Biotech. 12:437-462); if they are too long, entropy effects will likely destabilize the three-dimensional fold, and may also make folding kinetically impractical, and if they are too short, they will likely destabilize the molecule because of torsional or steric strain. Those skilled in the analysis of protein structural information will recognize that using the distance between the chain ends, defined as the distance between the c-alpha carbons, can be used to define the length of the sequence to be used or at least to limit the number of possibilities that must be tested in an empirical selection of linkers. They will also recognize that it is sometimes the case that the positions of the ends of the polypeptide chain are ill-defined in structural models derived from x-ray diffraction or nuclear magnetic resonance spectroscopy data, and that when true, this situation will therefore need to be taken into account in order to properly estimate the length of the linker required. From those residues whose positions are well defined are selected two residues that are close in sequence to the chain ends, and the distance between their c-alpha carbons is used to calculate an approximate length for a linker between them. Using the calculated length as a guide, linkers with a range of number of residues (calculated using 2 to 3.8 Å per residue) are then selected. These linkers may be composed of the original sequence, shortened or lengthened as necessary, and when lengthened the additional residues may be chosen to be flexible and hydrophilic as described above; or optionally the original sequence may be substituted for using a series of linkers, one example being the Gly-Gly-Gly-Ser cassette approach mentioned above; or optionally a combination of the original sequence and new sequence having the appropriate total length may be used. Sequences of pesticidal polypeptides capable of folding to biologically active states can be prepared by appropriate selection of the beginning (amino terminus) and ending (carboxyl terminus) positions from within the original polypeptide chain while using the linker sequence as described above. Amino and carboxyl termini are selected from within a common stretch of sequence, referred to as a breakpoint region, using the guidelines described below. A novel amino acid sequence is thus generated by selecting amino and carboxyl termini from within the same breakpoint region. In many cases the selection of the new termini will be such that the original position of the carboxyl terminus immediately preceded that of the amino terminus. However, those skilled in the art will recognize that selections of termini anywhere within the region may function, and that these will effectively lead to either deletions or additions to the amino or carboxyl portions of the new sequence. It is a central tenet of molecular biology that the primary amino acid sequence of a protein dictates folding to the three-dimensional structure necessary for expression of its biological function. Methods are known to those skilled in the art to obtain and interpret three-dimensional structural information using x-ray diffraction of single protein Crystals or nuclear magnetic resonance spectroscopy of protein solutions. Examples of structural information that are relevant to the identification of breakpoint regions include the location and type of protein secondary structure (alpha and 3-10 helices, parallel and anti-parallel beta sheets, chain reversals and turns, and loops; Kabsch and Sander, (1983) Biopolymers 22:2577-2637; the degree of solvent exposure of amino acid residues, the extent and type of interactions of residues with one another (Chothia, (1984) Ann. Rev. Biochem. 53:537-572) and the static and dynamic distribution of conformations along the polypeptide chain (Alber and Mathews, (1987) Methods Enzymol. 154:511-533). In some cases additional information is known about solvent exposure of residues; one example is a site of post-translational attachment of carbohydrate which is necessarily on the surface of the protein. When experimental structural information is not available or is not feasible to obtain, methods are also available to analyze the primary amino acid sequence in order to make predictions of protein tertiary and secondary structure, solvent accessibility and the occurrence of turns and loops. Biochemical methods are also sometimes applicable for empirically determining surface exposure when direct structural methods are not feasible; for example, using the identification of sites of chain scission following limited proteolysis in order to infer surface exposure (Gentile and Salvatore, (1993) Eur. J. Biochem. 218:603-621). Thus using either the experimentally derived structural information or predictive methods (e.g., Srinivisan and Rose, (1995) Proteins: Struct., Funct. & Genetics 22:81-99) the parental amino acid sequence is inspected to classify regions according to whether or not they are integral to the maintenance of secondary and tertiary structure. The occurrence of sequences within regions that are known to be involved in periodic secondary structure (alpha and 3-10 helices, parallel and anti-parallel beta sheets) are regions that should be avoided. Similarly, regions of amino acid sequence that are observed or PtIP- to have a low degree of solvent exposure are more likely to be part of the so-called hydrophobic core of the protein and should also be avoided for selection of amino and carboxyl termini. In contrast, those regions that are known or PtIP- to be in surface turns or loops, and especially those regions that are known not to be required for biological activity, are the preferred sites for location of the extremes of the polypeptide chain. Continuous stretches of amino acid sequence that are preferred based on the above criteria are referred to as a breakpoint region. Polynucleotides encoding circular permuted PtIP-83 polypeptides with new N-terminus/C-terminus which contain a linker region separating the original C-terminus and N-terminus can be made essentially following the method described in Mullins, et al., (1994) J. Am. Chem. Soc. 116:5529-5533. Multiple steps of polymerase chain reaction (PCR) amplifications are used to rearrange the DNA sequence encoding the primary amino acid sequence of the protein. Polynucleotides encoding circular permuted PtIP-83 polypeptides with new N-terminus/C-terminus which contain a linker region separating the original C-terminus and N-terminus can be made based on the tandem-duplication method described in Horlick, et al., (1992) Protein Eng. 5:427-431. Polymerase chain reaction (PCR) amplification of the new N-terminus/C-terminus genes is performed using a tandemly duplicated template DNA.

[0200] In another aspect fusion proteins are provided that include within its amino acid sequence an amino acid sequence comprising a PtIP-83 polypeptide including but not limited to the polypeptide of SEQ ID NO: 1, SEQ ID NO: 3, SEQ ID NO: 5, SEQ ID NO: 7, SEQ ID NO: 9, SEQ ID NO: 11, SEQ ID NO: 13, SEQ ID NO: 15, SEQ ID NO: 17, SEQ ID NO: 19, SEQ ID NO: 21, SEQ ID NO: 23, SEQ ID NO: 716, SEQ ID NO: 754, SEQ ID NO: 755, SEQ ID NO: 756, SEQ ID NO: 757, SEQ ID NO: 758, SEQ ID NO: 759, SEQ ID NO: 760, SEQ ID NO: 761, SEQ ID NO: 762, SEQ ID NO: 763, SEQ ID NO: 764, SEQ ID NO: 765, SEQ ID NO: 766, SEQ ID NO: 767, SEQ ID NO: 768, SEQ ID NO: 769, and active fragments thereof.

[0201] Methods for design and construction of fusion proteins (and polynucleotides encoding same) are known to those of skill in the art. Polynucleotides encoding a PtIP-83 polypeptide may be fused to signal sequences which will direct the localization of the PtIP-83 polypeptide to particular compartments of a prokaryotic or eukaryotic cell and/or direct the secretion of the PtIP-83 polypeptide of the embodiments from a prokaryotic or eukaryotic cell. For example, in E. coli, one may wish to direct the expression of the protein to the periplasmic space. Examples of signal sequences or proteins (or fragments thereof) to which the PtIP-83 polypeptide may be fused in order to direct the expression of the polypeptide to the periplasmic space of bacteria include, but are not limited to, the pelB signal sequence, the maltose binding protein (MBP) signal sequence, MBP, the ompA signal sequence, the signal sequence of the periplasmic E. coli heat-labile enterotoxin B-subunit and the signal sequence of alkaline phosphatase. Several vectors are commercially available for the construction of fusion proteins which will direct the localization of a protein, such as the pMAL series of vectors (particularly the pMAL-p series) available from New England Biolabs. In a specific embodiment, the PtIP-83 polypeptide may be fused to the pelB pectate lyase signal sequence to increase the efficiency of expression and purification of such polypeptides in Gram-negative bacteria (see, U.S. Pat. Nos. 5,576,195 and 5,846,818). Plant plastid transit peptide/polypeptide fusions are well known in the art (see, U.S. Pat. No. 7,193,133). Apoplast transit peptides such as rice or barley alpha-amylase secretion signal are also well known in the art. The plastid transit peptide is generally fused N-terminal to the polypeptide to be targeted (e.g., the fusion partner). In one embodiment, the fusion protein consists essentially of the plastid transit peptide and the PtIP-83 polypeptide to be targeted. In another embodiment, the fusion protein comprises the plastid transit peptide and the polypeptide to be targeted. In such embodiments, the plastid transit peptide is preferably at the N-terminus of the fusion protein. However, additional amino acid residues may be N-terminal to the plastid transit peptide providing that the fusion protein is at least partially targeted to a plastid. In a specific embodiment, the plastid transit peptide is in the N-terminal half, N-terminal third or N-terminal quarter of the fusion protein. Most or all of the plastid transit peptide is generally cleaved from the fusion protein upon insertion into the plastid. The position of cleavage may vary slightly between plant species, at different plant developmental stages, as a result of specific intercellular conditions or the particular combination of transit peptide/fusion partner used. In one embodiment, the plastid transit peptide cleavage is homogenous such that the cleavage site is identical in a population of fusion proteins. In another embodiment, the plastid transit peptide is not homogenous, such that the cleavage site varies by 1-10 amino acids in a population of fusion proteins. The plastid transit peptide can be recombinantly fused to a second protein in one of several ways. For example, a restriction endonuclease recognition site can be introduced into the nucleotide sequence of the transit peptide at a position corresponding to its C-terminal end and the same or a compatible site can be engineered into the nucleotide sequence of the protein to be targeted at its N-terminal end. Care must be taken in designing these sites to ensure that the coding sequences of the transit peptide and the second protein are kept “in frame” to allow the synthesis of the desired fusion protein. In some cases, it may be preferable to remove the initiator methionine codon of the second protein when the new restriction site is introduced. The introduction of restriction endonuclease recognition sites on both parent molecules and their subsequent joining through recombinant DNA techniques may result in the addition of one or more extra amino acids between the transit peptide and the second protein. This generally does not affect targeting activity as long as the transit peptide cleavage site remains accessible and the function of the second protein is not altered by the addition of these extra amino acids at its N-terminus. Alternatively, one skilled in the art can create a precise cleavage site between the transit peptide and the second protein (with or without its initiator methionine) using gene synthesis (Stemmer, et al., (1995) Gene 164:49-53) or similar methods. In addition, the transit peptide fusion can intentionally include amino acids downstream of the cleavage site. The amino acids at the N-terminus of the mature protein can affect the ability of the transit peptide to target proteins to plastids and/or the efficiency of cleavage following protein import. This may be dependent on the protein to be targeted. See, e.g., Comai, et al., (1988) J. Biol. Chem. 263(29):15104-9.

[0202] In some embodiments fusion proteins are provide comprising a PtIP-83 polypeptide and an insecticidal polypeptide joined by an amino acid linker. In some embodiments fusion proteins are provided represented by a formula selected from the group consisting of:

R1-L-R2,R2-L-R1,R1-R2 or R2-R1

[0203] wherein R1 is a PtIP-83 polypeptide, R2 is a protein of interest. The R1 polypeptide is fused either directly or through a linker (L) segment to the R2 polypeptide. The term “directly” defines fusions in which the polypeptides are joined without a peptide linker. Thus “L” represents a chemical bound or polypeptide segment to which both R1 and R2 are fused in frame, most commonly L is a linear peptide to which R1 and R2 are bound by amide bonds linking the carboxy terminus of R1 to the amino terminus of L and carboxy terminus of L to the amino terminus of R2. By “fused in frame” is meant that there is no translation termination or disruption between the reading frames of R1 and R2. The linking group (L) is generally a polypeptide of between 1 and 500 amino acids in length. The linkers joining the two molecules are preferably designed to (1) allow the two molecules to fold and act independently of each other, (2) not have a propensity for developing an ordered secondary structure which could interfere with the functional domains of the two proteins, (3) have minimal hydrophobic or charged characteristic which could interact with the functional protein domains and (4) provide steric separation of R1 and R2 such that R1 and R2 could interact simultaneously with their corresponding receptors on a single cell. Typically surface amino acids in flexible protein regions include Gly, Asn and Ser. Virtually any permutation of amino acid sequences containing Gly, Asn and Ser would be expected to satisfy the above criteria for a linker sequence. Other neutral amino acids, such as Thr and Ala, may also be used in the linker sequence. Additional amino acids may also be included in the linkers due to the addition of unique restriction sites in the linker sequence to facilitate construction of the fusions.

[0204] In some embodiments the linkers comprise sequences selected from the group of formulas: (Gly3Ser)n, (Gly4Ser)n, (Gly5Ser)n, (GlynSer)n or (AlaGlySer)n where n is an integer. One example of a highly-flexible linker is the (GlySer)-rich spacer region present within the pill protein of the filamentous bacteriophages, e.g. bacteriophages M13 or fd (Schaller, et al., 1975). This region provides a long, flexible spacer region between two domains of the pill surface protein. Also included are linkers in which an endopeptidase recognition sequence is included. Such a cleavage site may be valuable to separate the individual components of the fusion to determine if they are properly folded and active in vitro. Examples of various endopeptidases include, but are not limited to, Plasmin, Enterokinase, Kallikerin, Urokinase, Tissue Plasminogen activator, clostripain, Chymosin, Collagenase, Russell's Viper Venom Protease, Postproline cleavage enzyme, V8 protease, Thrombin and factor Xa. In some embodiments the linker comprises the amino acids EEKKN (SEQ ID NO: 37) from the multi-gene expression vehicle (MGEV), which is cleaved by vacuolar proteases as disclosed in US Patent Application Publication Number US 2007/0277263. In other embodiments, peptide linker segments from the hinge region of heavy chain immunoglobulins IgG, IgA, IgM, IgD or IgE provide an angular relationship between the attached polypeptides. Especially useful are those hinge regions where the cysteines are replaced with serines. Linkers of the present disclosure include sequences derived from murine IgG gamma 2b hinge region in which the cysteines have been changed to serines. The fusion proteins are not limited by the form, size or number of linker sequences employed and the only requirement of the linker is that functionally it does not interfere adversely with the folding and function of the individual molecules of the fusion.

[0205] In another aspect chimeric PtIP-83 polypeptides are provided that are created through joining two or more portions of PtIP-83 genes, which originally encoded separate PtIP-83 proteins to create a chimeric gene. The translation of the chimeric gene results in a single chimeric PtIP-83 polypeptide with regions, motifs or domains derived from each of the original polypeptides. In certain embodiments the chimeric protein comprises portions, motifs or domains of PtIP-83 polypeptides of SEQ ID NO: 1, SEQ ID NO: 3, SEQ ID NO: 5, SEQ ID NO: 7, SEQ ID NO: 9, SEQ ID NO: 11, SEQ ID NO: 13, SEQ ID NO: 15, SEQ ID NO: 17, SEQ ID NO: 19, SEQ ID NO: 21, SEQ ID NO: 23, SEQ ID NO: 716, SEQ ID NO: 754, SEQ ID NO: 755, SEQ ID NO: 756, SEQ ID NO: 757, SEQ ID NO: 758, SEQ ID NO: 759, SEQ ID NO: 760, SEQ ID NO: 761, SEQ ID NO: 762, SEQ ID NO: 763, SEQ ID NO: 764, SEQ ID NO: 765, SEQ ID NO: 766, SEQ ID NO: 767, SEQ ID NO: 768 or SEQ ID NO: 769, in any combination.

[0206] It is recognized that DNA sequences may be altered by various methods, and that these alterations may result in DNA sequences encoding proteins with amino acid sequences different than that encoded by the wild-type (or native) pesticidal protein. In some embodiments a PtIP-83 polypeptide may be altered in various ways including amino acid substitutions, deletions, truncations and insertions of one or more amino acids, including up to 2, 3, 4, 5, 6, 7, 8, 9, 10, 15, 20, 25, 30, 35, 40, 45, 50, 55, 60, 65, 70, 75, 80, 85, 90, 100, 105, 110, 115, 120, 125, 130, 135, 140, 145 or more amino acid substitutions, deletions and/or insertions or combinations thereof compared to any one of SEQ ID NO: 1, SEQ ID NO: 3, SEQ ID NO: 5, SEQ ID NO: 7, SEQ ID NO: 9, SEQ ID NO: 11, SEQ ID NO: 13, SEQ ID NO: 15, SEQ ID NO: 17, SEQ ID NO: 19, SEQ ID NO: 21, SEQ ID NO: 23, SEQ ID NO: 716, SEQ ID NO: 754, SEQ ID NO: 755, SEQ ID NO: 756, SEQ ID NO: 757, SEQ ID NO: 758, SEQ ID NO: 759, SEQ ID NO: 760, SEQ ID NO: 761, SEQ ID NO: 762, SEQ ID NO: 763, SEQ ID NO: 764, SEQ ID NO: 765, SEQ ID NO: 766, SEQ ID NO: 767, SEQ ID NO: 768 or SEQ ID NO: 769.

[0207] In some embodiments a PtIP-83 polypeptide variant comprises one or more amino acid substitution, of Table 13, Table 14, Table 15, Table 16, Tablel7, Table 18, Table 20, Table 21, Table 23, Table 24 or combinations thereof, compared to the native amino acid of PtIP-83Aa (SEQ ID NO: 1) at the corresponding residue.

[0208] In some embodiments a PtIP-83 polypeptide variant is selected from but not limited to any one of SEQ ID NO: 236-299, SEQ ID NO: 334-367, SEQ ID NO: 398-427, SEQ ID NO: 518-607, and SEQ ID NO: 728-737.

[0209] In some embodiments a PtIP-83 polypeptide comprises a deletion of 1, 2, 3, 4, 5, 6, 7, 8, 9, 10, 11, 12, 13, 14, 15 or more amino acids from the N-terminus of the PtIP-83 polypeptide relative to the amino acid position of any one of SEQ ID NO: 1, SEQ ID NO: 3, SEQ ID NO: 5, SEQ ID NO: 7, SEQ ID NO: 9, SEQ ID NO: 11, SEQ ID NO: 13, SEQ ID NO: 15, SEQ ID NO: 17, SEQ ID NO: 19, SEQ ID NO: 21, SEQ ID NO: 23, SEQ ID NO: 716, SEQ ID NO: 754, SEQ ID NO: 755, SEQ ID NO: 756, SEQ ID NO: 757, SEQ ID NO: 758, SEQ ID NO: 759, SEQ ID NO: 760, SEQ ID NO: 761, SEQ ID NO: 762, SEQ ID NO: 763, SEQ ID NO: 764, SEQ ID NO: 765, SEQ ID NO: 766, SEQ ID NO: 767, SEQ ID NO: 768 or SEQ ID NO: 769.

[0210] In some embodiments a PtIP-83 polypeptide comprises a deletion of 1, 2, 3, 4, 5, 6, 7, 8, 9, 10, 11, 12, 13, 14, 15 or more amino acids from the C-terminus of the PtIP-83 polypeptide relative to the amino acid position of any one of SEQ ID NO: 1, SEQ ID NO: 3, SEQ ID NO: 5, SEQ ID NO: 7, SEQ ID NO: 9, SEQ ID NO: 11, SEQ ID NO: 13, SEQ ID NO: 15, SEQ ID NO: 17, SEQ ID NO: 19, SEQ ID NO: 21, SEQ ID NO: 23, SEQ ID NO: 716, SEQ ID NO: 754, SEQ ID NO: 755, SEQ ID NO: 756, SEQ ID NO: 757, SEQ ID NO: 758, SEQ ID NO: 759, SEQ ID NO: 760, SEQ ID NO: 761, SEQ ID NO: 762, SEQ ID NO: 763, SEQ ID NO: 764, SEQ ID NO: 765, SEQ ID NO: 766, SEQ ID NO: 767, SEQ ID NO: 768 or SEQ ID NO: 769.

[0211] Methods for such manipulations are generally known in the art. For example, amino acid sequence variants of a PtIP-83 polypeptide can be prepared by mutations in the DNA. This may also be accomplished by one of several forms of mutagenesis and/or in directed evolution. In some aspects, the changes encoded in the amino acid sequence will not substantially affect the function of the protein. Such variants will possess the desired pesticidal activity. However, it is understood that the ability of a PtIP-83 polypeptide to confer pesticidal activity may be improved by the use of such techniques upon the compositions of this disclosure.

[0212] For example, conservative amino acid substitutions may be made at one or more, PtIP-, nonessential amino acid residues. A “nonessential” amino acid residue is a residue that can be altered from the wild-type sequence of a PtIP-83 without altering the biological activity. A “conservative amino acid substitution” is one in which the amino acid residue is replaced with an amino acid residue having a similar side chain. Families of amino acid residues having similar side chains have been defined in the art. These families include: amino acids with basic side chains (e.g., lysine, arginine, histidine); acidic side chains (e.g., aspartic acid, glutamic acid); polar, negatively charged residues and their amides (e.g., aspartic acid, asparagine, glutamic, acid, glutamine; uncharged polar side chains (e.g., glycine, asparagine, glutamine, serine, threonine, tyrosine, cysteine); small aliphatic, nonpolar or slightly polar residues (e.g., Alanine, serine, threonine, proline, glycine); nonpolar side chains (e.g., alanine, valine, leucine, isoleucine, proline, phenylalanine, methionine, tryptophan); large aliphatic, nonpolar residues (e.g., methionine, leucine, isoleucine, valine, cystine); beta-branched side chains (e.g., threonine, valine, isoleucine); aromatic side chains (e.g., tyrosine, phenylalanine, tryptophan, histidine); large aromatic side chains (e.g., tyrosine, phenylalanine, tryptophan).

[0213] Amino acid substitutions may be made in nonconserved regions that retain function. In general, such substitutions would not be made for conserved amino acid residues or for amino acid residues residing within a conserved motif, where such residues are essential for protein activity. Examples of residues that are conserved and that may be essential for protein activity include, for example, residues that are identical between all proteins contained in an alignment of similar or related toxins to the sequences of the embodiments (e.g., residues that are identical in an alignment of homologous proteins). Examples of residues that are conserved but that may allow conservative amino acid substitutions and still retain activity include, for example, residues that have only conservative substitutions between all proteins contained in an alignment of similar or related toxins to the sequences of the embodiments (e.g., residues that have only conservative substitutions between all proteins contained in the alignment homologous proteins). However, one of skill in the art would understand that functional variants may have minor conserved or nonconserved alterations in the conserved residues. Guidance as to appropriate amino acid substitutions that do not affect biological activity of the protein of interest may be found in the model of Dayhoff, et al., (1978) Atlas of Protein Sequence and Structure (Natl. Biomed. Res. Found., Washington, D.C.), herein incorporated by reference. In making such changes, the hydropathic index of amino acids may be considered. The importance of the hydropathic amino acid index in conferring interactive biologic function on a protein is generally understood in the art (Kyte and Doolittle, (1982) J Mol Biol. 157(1):105-32). It is accepted that the relative hydropathic character of the amino acid contributes to the secondary structure of the resultant protein, which in turn defines the interaction of the protein with other molecules, for example, enzymes, substrates, receptors, DNA, antibodies, antigens, and the like.

[0214] It is known in the art that certain amino acids may be substituted by other amino acids having a similar hydropathic index or score and still result in a protein with similar biological activity, i.e., still obtain a biological functionally equivalent protein. Each amino acid has been assigned a hydropathic index on the basis of its hydrophobicity and charge characteristics (Kyte and Doolittle, ibid). These are: isoleucine (+4.5); valine (+4.2); leucine (+3.8); phenylalanine (+2.8); cysteine/cystine (+2.5); methionine (+1.9); alanine (+1.8); glycine (−0.4); threonine (−0.7); serine (−0.8); tryptophan (−0.9); tyrosine (−1.3); proline (−1.6); histidine (−3.2); glutamate (−3.5); glutamine (−3.5); aspartate (−3.5); asparagine (−3.5); lysine (−3.9) and arginine (−4.5). In making such changes, the substitution of amino acids whose hydropathic indices are within +2 is preferred, those which are within +1 are particularly preferred, and those within +0.5 are even more particularly preferred.

[0215] It is also understood in the art that the substitution of like amino acids can be made effectively on the basis of hydrophilicity. U.S. Pat. No. 4,554,101, states that the greatest local average hydrophilicity of a protein, as governed by the hydrophilicity of its adjacent amino acids, correlates with a biological property of the protein.

[0216] As detailed in U.S. Pat. No. 4,554,101, the following hydrophilicity values have been assigned to amino acid residues: arginine (+3.0); lysine (+3.0); aspartate (+3.0.+0.1); glutamate (+3.0.+0.1); serine (+0.3); asparagine (+0.2); glutamine (+0.2); glycine (0); threonine (−0.4); proline (−0.5.+0.1); alanine (−0.5); histidine (−0.5); cysteine (−1.0); methionine (−1.3); valine (−1.5); leucine (−1.8); isoleucine (−1.8); tyrosine (−2.3); phenylalanine (−2.5); tryptophan (−3.4).

[0217] Alternatively, alterations may be made to the protein sequence of many proteins at the amino or carboxy terminus without substantially affecting activity. This can include insertions, deletions or alterations introduced by modern molecular methods, such as PCR, including PCR amplifications that alter or extend the protein coding sequence by virtue of inclusion of amino acid encoding sequences in the oligonucleotides utilized in the PCR amplification. Alternatively, the protein sequences added can include entire protein-coding sequences, such as those used commonly in the art to generate protein fusions. Such fusion proteins are often used to (1) increase expression of a protein of interest (2) introduce a binding domain, enzymatic activity or epitope to facilitate either protein purification, protein detection or other experimental uses known in the art (3) target secretion or translation of a protein to a subcellular organelle, such as the periplasmic space of Gram-negative bacteria, mitochondria or chloroplasts of plants or the endoplasmic reticulum of eukaryotic cells, the latter of which often results in glycosylation of the protein.

[0218] Variant nucleotide and amino acid sequences of the disclosure also encompass sequences derived from mutagenic and recombinogenic procedures such as DNA shuffling. With such a procedure, one or more different PtIP-83 polypeptide coding regions can be used to create a new PtIP-83 polypeptide possessing the desired properties. In this manner, libraries of recombinant polynucleotides are generated from a population of related sequence polynucleotides comprising sequence regions that have substantial sequence identity and can be homologously recombined in vitro or in vivo. For example, using this approach, sequence motifs encoding a domain of interest may be shuffled between a pesticidal gene and other known pesticidal genes to obtain a new gene coding for a protein with an improved property of interest, such as an increased insecticidal activity. Strategies for such DNA shuffling are known in the art. See, for example, Stemmer, (1994) Proc. Natl. Acad. Sci. USA 91:10747-10751; Stemmer, (1994) Nature 370:389-391; Crameri, et al., (1997) Nature Biotech. 15:436-438; Moore, et al., (1997) J. Mol. Biol. 272:336-347; Zhang, et al., (1997) Proc. Natl. Acad. Sci. USA 94:4504-4509; Crameri, et al., (1998) Nature 391:288-291; and U.S. Pat. Nos. 5,605,793 and 5,837,458.

[0219] Domain swapping or shuffling is another mechanism for generating altered PtIP-83 polypeptides. Domains may be swapped between PtIP-83 polypeptides resulting in hybrid or chimeric toxins with improved insecticidal activity or target spectrum. Methods for generating recombinant proteins and testing them for pesticidal activity are well known in the art (see, for example, Naimov, et al., (2001) Appl. Environ. Microbiol. 67:5328-5330; de Maagd, et al., (1996) Appl. Environ. Microbiol. 62:1537-1543; Ge, et al., (1991) J. Biol. Chem. 266:17954-17958; Schnepf, et al., (1990) J. Biol. Chem. 265:20923-20930; Rang, et al., 91999) Appl. Environ. Microbiol. 65:2918-2925).

[0220] Alignment of PtIP-83 homologs (FIG. 2) allows for identification of residues that are highly conserved among natural homologs in this family.

[0221] In some embodiments PtIP-83 polypeptides are provided comprising an amino acid sequence having at least 80%, at least 85%, at least 90%, at least 95%, at least 96%, at least 97%, at least 98% or at least 99% sequence identity to any one of SEQ ID NO: 786-888.

[0222] In some embodiments PtIP-83 polypeptides are provide comprising the amino acid sequence of any one of SEQ ID NO: 786-888.

[0223] In some embodiments the PtIP-83 polypeptide is not the amino acid sequence of any one of SEQ ID NO: 786-888.

### Compositions

[0224] Compositions comprising a PtIP-83 polypeptide of the disclosure are also embraced. In some embodiments the composition comprises a PtIP-83 polypeptide of SEQ ID NO: 1, SEQ ID NO: 3, SEQ ID NO: 5, SEQ ID NO: 7, SEQ ID NO: 9, SEQ ID NO: 11, SEQ ID NO: 13, SEQ ID NO: 15, SEQ ID NO: 17, SEQ ID NO: 19, SEQ ID NO: 21, SEQ ID NO: 23, SEQ ID NO: 716, SEQ ID NO: 754, SEQ ID NO: 755, SEQ ID NO: 756, SEQ ID NO: 757, SEQ ID NO: 758, SEQ ID NO: 759, SEQ ID NO: 760, SEQ ID NO: 761, SEQ ID NO: 762, SEQ ID NO: 763, SEQ ID NO: 764, SEQ ID NO: 765, SEQ ID NO: 766, SEQ ID NO: 767, SEQ ID NO: 768 or SEQ ID NO: 769 or a variant thereof. In some embodiments the composition comprises a PtIP-83 fusion protein.

[0225] In some embodiments compositions are provided comprising a PtIP-83 polypeptide comprising an amino acid sequence of any one of SEQ ID NO: 236-299, SEQ ID NO: 334-367, SEQ ID NO: 398-427, SEQ ID NO: 518-607, SEQ ID NO: 640-645, and SEQ ID NO: 728-737 or a variant thereof.

[0226] In some embodiments compositions are provide comprising a PtIP-83 polypeptide comprising the amino acid sequence of any one of SEQ ID NO: 786-888 or a variant thereof.

[0227] In some embodiments agricultural compositions of PtIP-83 polypeptides are disclosed. In the embodiments, a transformed microorganism (which includes whole organisms, cells, spore(s), PtIP-83 polypeptide(s), pesticidal component(s), pest-impacting component(s), variant(s), living or dead cells and cell components, including mixtures of living and dead cells and cell components, and including broken cells and cell components) or an isolated PtIP-83 polypeptide(s) can be formulated with an acceptable carrier into a pesticidal composition(s) that is, for example, a suspension, a solution, an emulsion, a dusting powder, a dispersible granule or pellet, a wettable powder, and an emulsifiable concentrate, an aerosol or spray, an impregnated granule, an adjuvant, a coatable paste, a colloid, and also encapsulations in, for example, polymer substances. Such formulated compositions may be prepared by such conventional means as desiccation, lyophilization, homogenization, extraction, filtration, centrifugation, sedimentation, or concentration of a culture of cells comprising the polypeptide.

[0228] Such compositions disclosed above may be obtained by the addition of a surface-active agent, an inert carrier, a preservative, a humectant, a feeding stimulant, an attractant, an encapsulating agent, a binder, an emulsifier, a dye, a UV protectant, a buffer, a flow agent or fertilizers, micronutrient donors, or other preparations that influence plant growth. One or more agrochemicals including, but not limited to, herbicides, insecticides, fungicides, bactericides, nematocides, molluscicides, acaricides, plant growth regulators, harvest aids, and fertilizers, can be combined with carriers, surfactants or adjuvants customarily employed in the art of formulation or other components to facilitate product handling and application for particular target pests. Suitable carriers and adjuvants can be solid or liquid and correspond to the substances ordinarily employed in formulation technology, e.g., natural or regenerated mineral substances, solvents, dispersants, wetting agents, tackifiers, binders, or fertilizers. The active ingredients of the embodiments are normally applied in the form of compositions and can be applied to the crop area, plant, or seed to be treated. For example, the compositions of the embodiments may be applied to grain in preparation for or during storage in a grain bin or silo, etc. The compositions of the embodiments may be applied simultaneously or in succession with other compounds. Methods of applying an active ingredient of the embodiments or an agrochemical composition of the embodiments that contains at least one of the Cyt1A variant polypeptides produced by the bacterial strains of the embodiments include, but are not limited to, foliar application, seed coating, and soil application. The number of applications and the rate of application depend on the intensity of infestation by the corresponding pest.

[0229] Suitable surface-active agents include, but are not limited to, anionic compounds such as a carboxylate of, for example, a metal; a carboxylate of a long chain fatty acid; an N-acylsarcosinate; mono or di-esters of phosphoric acid with fatty alcohol ethoxylates or salts of such esters; fatty alcohol sulfates such as sodium dodecyl sulfate, sodium octadecyl sulfate or sodium cetyl sulfate; ethoxylated fatty alcohol sulfates; ethoxylated alkylphenol sulfates; lignin sulfonates; petroleum sulfonates; alkyl aryl sulfonates such as alkyl-benzene sulfonates or lower alkylnaphtalene sulfonates, e.g., butyl-naphthalene sulfonate; salts of sulfonated naphthalene-formaldehyde condensates; salts of sulfonated phenol-formaldehyde condensates; more complex sulfonates such as the amide sulfonates, e.g., the sulfonated condensation product of oleic acid and N-methyl taurine; or the dialkyl sulfosuccinates, e.g., the sodium sulfonate of dioctyl succinate. Non-ionic agents include condensation products of fatty acid esters, fatty alcohols, fatty acid amides or fatty-alkyl- or alkenyl-substituted phenols with ethylene oxide, fatty esters of polyhydric alcohol ethers, e.g., sorbitan fatty acid esters, condensation products of such esters with ethylene oxide, e.g., polyoxyethylene sorbitar fatty acid esters, block copolymers of ethylene oxide and propylene oxide, acetylenic glycols such as 2,4,7,9-tetraethyl-5-decyn-4,7-diol, or ethoxylated acetylenic glycols. Examples of a cationic surface-active agent include, for instance, an aliphatic mono-, di-, or polyamine such as an acetate, naphthenate or oleate; or oxygen-containing amine such as an amine oxide of polyoxyethylene alkylamine; an amide-linked amine prepared by the condensation of a carboxylic acid with a di- or polyamine; or a quaternary ammonium salt.

[0230] Examples of inert materials include but are not limited to inorganic minerals such as kaolin, phyllosilicates, carbonates, sulfates, phosphates, Mica, Amorphous Silica Gel, talc, clay, volcanic ash or botanical materials such as cork, powdered corncobs, peanut hulls, rice hulls, and walnut shells. Kaolins such as kaolinite, dickite, nacrite, anauxite, halloysite and endellite are useful as carrier materials. Montmorillonites, such as beidellite, nontronite, montmorillonite, hectorite, saponite, sauconite and bentonite are useful as carrier materials. Vermiculites such as biotite are useful as carrier materials.

[0231] The compositions of the embodiments can be in a suitable form for direct application or as a concentrate of primary composition that requires dilution with a suitable quantity of water or other diluent before application. The pesticidal concentration will vary depending upon the nature of the particular formulation, specifically, whether it is a concentrate or to be used directly. The composition contains 1 to 98% of a solid or liquid inert carrier, and 0 to 50% or 0.1 to 50% of a surfactant. These compositions will be administered at the labeled rate for the commercial product, for example, about 0.01 lb-5.0 lb. per acre when in dry form and at about 0.01 pts.-10 pts. per acre when in liquid form.

### Antibodies

[0232] Antibodies to a PtIP-83 polypeptide of the embodiments or to variants or fragments thereof are also encompassed. The antibodies of the disclosure include polyclonal and monoclonal antibodies as well as fragments thereof which retain their ability to bind to PtIP-83 polypeptide found in the insect gut. An antibody, monoclonal antibody or fragment thereof is said to be capable of binding a molecule if it is capable of specifically reacting with the molecule to thereby bind the molecule to the antibody, monoclonal antibody or fragment thereof. The term “antibody” (Ab) or “monoclonal antibody” (Mab) is meant to include intact molecules as well as fragments or binding regions or domains thereof (such as, for example, Fab and F(ab).sub.2 fragments) which are capable of binding hapten. Such fragments are typically produced by proteolytic cleavage, such as papain or pepsin. Alternatively, hapten-binding fragments can be produced through the application of recombinant DNA technology or through synthetic chemistry. Methods for the preparation of the antibodies of the present disclosure are generally known in the art. For example, see, Antibodies, A Laboratory Manual, Ed Harlow and David Lane (eds.) Cold Spring Harbor Laboratory, N.Y. (1988), as well as the references cited therein. Standard reference works setting forth the general principles of immunology include: Klein, J. Immunology: The Science of Cell-Noncell Discrimination, John Wiley & Sons, N.Y. (1982); Dennett, et al., Monoclonal Antibodies, Hybridoma: A New Dimension in Biological Analyses, Plenum Press, N.Y. (1980) and Campbell, “Monoclonal Antibody Technology,” In Laboratory Techniques in Biochemistry and Molecular Biology, Vol. 13, Burdon, et al., (eds.), Elsevier, Amsterdam (1984). See also, U.S. Pat. Nos. 4,196,265; 4,609,893; 4,713,325; 4,714,681; 4,716,111; 4,716,117 and 4,720,459. PtIP-83 polypeptide antibodies or antigen-binding portions thereof can be produced by a variety of techniques, including conventional monoclonal antibody methodology, for example the standard somatic cell hybridization technique of Kohler and Milstein, (1975) Nature 256:495. Other techniques for producing monoclonal antibody can also be employed such as viral or oncogenic transformation of B lymphocytes. An animal system for preparing hybridomas is a murine system. Immunization protocols and techniques for isolation of immunized splenocytes for fusion are known in the art. Fusion partners (e.g., murine myeloma cells) and fusion procedures are also known. The antibody and monoclonal antibodies of the disclosure can be prepared by utilizing a PtIP-83 polypeptide as antigens.

[0233] A kit for detecting the presence of a PtIP-83 polypeptide or detecting the presence of a nucleotide sequence encoding a PtIP-83 polypeptide in a sample is provided. In one embodiment, the kit provides antibody-based reagents for detecting the presence of a PtIP-83 polypeptide in a tissue sample. In another embodiment, the kit provides labeled nucleic acid probes useful for detecting the presence of one or more polynucleotides encoding PtIP-83 polypeptide. The kit is provided along with appropriate reagents and controls for carrying out a detection method, as well as instructions for use of the kit.

### Receptor Identification and Isolation

[0234] Receptors to the PtIP-83 polypeptide of the embodiments or to variants or fragments thereof, are also encompassed. Methods for identifying receptors are well known in the art (see, Hofmann, et. al., (1988) Eur. J. Biochem. 173:85-91; Gill, et al., (1995) J. Biol. Chem. 27277-27282) can be employed to identify and isolate the receptor that recognizes the PtIP-83 polypeptide using the brush-border membrane vesicles from susceptible insects. In addition to the radioactive labeling method listed in the cited literatures, PtIP-83 polypeptide can be labeled with fluorescent dye and other common labels such as streptavidin. Brush-border membrane vesicles (BBMV) of susceptible insects such as soybean looper and stink bugs can be prepared according to the protocols listed in the references and separated on SDS-PAGE gel and blotted on suitable membrane. Labeled PtIP-83 polypeptide can be incubated with blotted membrane of BBMV and labeled the PtIP-83 polypeptide can be identified with the labeled reporters. Identification of protein band(s) that interact with the PtIP-83 polypeptide can be detected by N-terminal amino acid gas phase sequencing or mass spectrometry based protein identification method (Patterson, (1998) 10.22, 1-24, Current Protocol in Molecular Biology published by John Wiley & Son Inc). Once the protein is identified, the corresponding gene can be cloned from genomic DNA or cDNA library of the susceptible insects and binding affinity can be measured directly with the PtIP-83 polypeptide. Receptor function for insecticidal activity by the PtIP-83 polypeptide can be verified by accomplished by RNAi type of gene knock out method (Rajagopal, et al., (2002) J. Biol. Chem. 277:46849-46851).

### Nucleotide Constructs, Expression Cassettes and Vectors

[0235] The use of the term “nucleotide constructs” herein is not intended to limit the embodiments to nucleotide constructs comprising DNA. Those of ordinary skill in the art will recognize that nucleotide constructs particularly polynucleotides and oligonucleotides composed of ribonucleotides and combinations of ribonucleotides and deoxyribonucleotides may also be employed in the methods disclosed herein. The nucleotide constructs, nucleic acids, and nucleotide sequences of the embodiments additionally encompass all complementary forms of such constructs, molecules, and sequences. Further, the nucleotide constructs, nucleotide molecules, and nucleotide sequences of the embodiments encompass all nucleotide constructs, molecules, and sequences which can be employed in the methods of the embodiments for transforming plants including, but not limited to, those comprised of deoxyribonucleotides, ribonucleotides, and combinations thereof. Such deoxyribonucleotides and ribonucleotides include both naturally occurring molecules and synthetic analogues. The nucleotide constructs, nucleic acids, and nucleotide sequences of the embodiments also encompass all forms of nucleotide constructs including, but not limited to, single-stranded forms, double-stranded forms, hairpins, stem-and-loop structures and the like.

[0236] A further embodiment relates to a transformed organism such as an organism selected from plant and insect cells, bacteria, yeast, baculovirus, protozoa, nematodes and algae. The transformed organism comprises a DNA molecule of the embodiments, an expression cassette comprising the DNA molecule or a vector comprising the expression cassette, which may be stably incorporated into the genome of the transformed organism.

[0237] In some embodiments transgenic host cells are provide transformed with a polynucleotide encoding a PtIP-83 polypeptide of the disclosure. In some embodiments the host cell is a plant cell. In some embodiments the host cell is a bacteria.

[0238] The sequences of the embodiments are provided in DNA constructs for expression in the organism of interest. The construct will include 5′ and 3′ regulatory sequences operably linked to a sequence of the embodiments. The term “operably linked” as used herein refers to a functional linkage between a promoter and a second sequence, wherein the promoter sequence initiates and mediates transcription of the DNA sequence corresponding to the second sequence. Generally, operably linked means that the nucleic acid sequences being linked are contiguous and where necessary to join two protein coding regions in the same reading frame. The construct may additionally contain at least one additional gene to be cotransformed into the organism. Alternatively, the additional gene(s) can be provided on multiple DNA constructs.

[0239] Such a DNA construct is provided with a plurality of restriction sites for insertion of the PtIP-83 polypeptide gene sequence to be under the transcriptional regulation of the regulatory regions. The DNA construct may additionally contain selectable marker genes.

[0240] The DNA construct will generally include in the 5′ to 3′ direction of transcription: a transcriptional and translational initiation region (i.e., a promoter), a DNA sequence of the embodiments, and a transcriptional and translational termination region (i.e., termination region) functional in the organism serving as a host. The transcriptional initiation region (i.e., the promoter) may be native, analogous, foreign or heterologous to the host organism and/or to the sequence of the embodiments. Additionally, the promoter may be the natural sequence or alternatively a synthetic sequence. The term “foreign” as used herein indicates that the promoter is not found in the native organism into which the promoter is introduced. Where the promoter is “foreign” or “heterologous” to the sequence of the embodiments, it is intended that the promoter is not the native or naturally occurring promoter for the operably linked sequence of the embodiments. As used herein, a chimeric gene comprises a coding sequence operably linked to a transcription initiation region that is heterologous to the coding sequence. Where the promoter is a native or natural sequence, the expression of the operably linked sequence is altered from the wild-type expression, which results in an alteration in phenotype.

[0241] In some embodiments the DNA construct may also include a transcriptional enhancer sequence. As used herein, the term an “enhancer” refers to a DNA sequence which can stimulate promoter activity, and may be an innate element of the promoter or a heterologous element inserted to enhance the level or tissue-specificity of a promoter. Various enhancers are known in the art including for example, introns with gene expression enhancing properties in plants (US Patent Application Publication Number 2009/0144863, the ubiquitin intron (i.e., the maize ubiquitin intron 1 (see, for example, NCBI sequence S94464)), the omega enhancer or the omega prime enhancer (Gallie, et al., (1989) Molecular Biology of RNA ed. Cech (Liss, New York) 237-256 and Gallie, et al., (1987) Gene 60:217-25), the CaMV 35S enhancer (see, e.g., Benfey, et al., (1990) EMBO J. 9:1685-96) and the enhancers of U.S. Pat. No. 7,803,992 may also be used, each of which is incorporated by reference. The above list of transcriptional enhancers is not meant to be limiting. Any appropriate transcriptional enhancer can be used in the embodiments.

[0242] The termination region may be native with the transcriptional initiation region, may be native with the operably linked DNA sequence of interest, may be native with the plant host or may be derived from another source (i.e., foreign or heterologous to the promoter, the sequence of interest, the plant host or any combination thereof).

[0243] Convenient termination regions are available from the Ti-plasmid of A. tumefaciens, such as the octopine synthase and nopaline synthase termination regions. See also, Guerineau, et al., (1991) Mol. Gen. Genet. 262:141-144; Proudfoot, (1991) Cell 64:671-674; Sanfacon, et al., (1991) Genes Dev. 5:141-149; Mogen, et al., (1990) Plant Cell 2:1261-1272; Munroe, et al., (1990) Gene 91:151-158; Ballas, et al., (1989) Nucleic Acids Res. 17:7891-7903 and Joshi, et al., (1987) Nucleic Acid Res. 15:9627-9639.

[0244] Where appropriate, a nucleic acid may be optimized for increased expression in the host organism. Thus, where the host organism is a plant, the synthetic nucleic acids can be synthesized using plant-preferred codons for improved expression. See, for example, Campbell and Gowri, (1990) Plant Physiol. 92:1-11 for a discussion of host-preferred codon usage. For example, although nucleic acid sequences of the embodiments may be expressed in both monocotyledonous and dicotyledonous plant species, sequences can be modified to account for the specific codon preferences and GC content preferences of monocotyledons or dicotyledons as these preferences have been shown to differ (Murray et al. (1989) Nucleic Acids Res. 17:477-498). Thus, the maize-preferred codon for a particular amino acid may be derived from known gene sequences from maize. Maize codon usage for 28 genes from maize plants is listed in Table 4 of Murray, et al., supra. Methods are available in the art for synthesizing plant-preferred genes. See, for example, U.S. Pat. Nos. 5,380,831, and 5,436,391 and Murray, et al., (1989) Nucleic Acids Res. 17:477-498, and Liu H et al. Mol Bio Rep 37:677-684, 2010, herein incorporated by reference. A Zea maize codon usage table can be also found at kazusa.or.jp/codon/cgi-bin/showcodon.cgi?species=4577, which can be accessed using the www prefix. Table 3 shows a maize optimal codon analysis (adapted from Liu H et al. Mol Bio Rep 37:677-684, 2010).

TABLE 3

| Amino | | High | | Low | | Amino | | High | | Low | |
|---|---|---|---|---|---|---|---|---|---|---|---|
| Acid | Codon | Count | RSCU | Count | RSCU | Acid | Codon | Count | RSCU | Count | RSCU |
| Phe | UUU | 115 | 0.04 | 2,301 | 1.22 | Ala | GCU | 629 | 0.17 | 3,063 | 1.59 |
| | UUC* | 5,269 | 1.96 | 1,485 | 0.78 | | GCC* | 8,057 | 2.16 | 1,136 | 0.59 |
| Ser | UCU | 176 | 0.13 | 2,498 | 1.48 | | GCA | 369 | 0.1 | 2,872 | 1.49 |
| | UCC* | 3,489 | 2.48 | 1,074 | 0.63 | | GCG* | 5,835 | 1.57 | 630 | 0.33 |
| | UCA | 104 | 0.07 | 2,610 | 1.54 | Tyr | UAU | 71 | 0.04 | 1,632 | 1.22 |
| | UCG* | 1,975 | 1.4 | 670 | 0.4 | | UAC* | 3,841 | 1.96 | 1,041 | 0.78 |
| | AGU | 77 | 0.05 | 1,788 | 1.06 | His | CAU | 131 | 0.09 | 1,902 | 1.36 |
| | AGC* | 2,617 | 1.86 | 1,514 | 0.89 | | CAC* | 2,800 | 1.91 | 897 | 0.64 |
| Leu | UUA | 10 | 0.01 | 1,326 | 0.79 | Cys | UGU | 52 | 0.04 | 1,233 | 1.12 |
| | UUG | 174 | 0.09 | 2,306 | 1.37 | | UGC* | 2,291 | 1.96 | 963 | 0.88 |
| | CUU | 223 | 0.11 | 2,396 | 1.43 | Gln | CAA | 99 | 0.05 | 2,312 | 1.04 |
| | CUC* | 5,979 | 3.08 | 1,109 | 0.66 | | CAG* | 3,557 | 1.95 | 2,130 | 0.96 |
| | CUA | 106 | 0.05 | 1,280 | 0.76 | Arg | CGU | 153 | 0.12 | 751 | 0.74 |
| | CUG* | 5,161 | 2.66 | 1,646 | 0.98 | | CGC* | 4,278 | 3.25 | 466 | 0.46 |
| Pro | CCU | 427 | 0.22 | 1,900 | 1.47 | | CGA | 92 | 0.07 | 659 | 0.65 |
| | CCC* | 3,035 | 1.59 | 601 | 0.47 | | CGG* | 1,793 | 1.36 | 631 | 0.62 |
| | CCA | 311 | 0.16 | 2,140 | 1.66 | | AGA | 83 | 0.06 | 1,948 | 1.91 |
| | CCG* | 3,846 | 2.02 | 513 | 0.4 | | AGG* | 1,493 | 1.14 | 1,652 | 1.62 |
| Ile | AUU | 138 | 0.09 | 2,388 | 1.3 | Asn | AAU | 131 | 0.07 | 3,074 | 1.26 |
| | AUC* | 4,380 | 2.85 | 1,353 | 0.74 | | AAC* | 3,814 | 1.93 | 1,807 | 0.74 |
| | AUA | 88 | 0.06 | 1,756 | 0.96 | Lys | AAA | 130 | 0.05 | 3,215 | 0.98 |
| Thr | ACU | 136 | 0.09 | 1,990 | 1.43 | | AAG* | 5,047 | 1.95 | 3,340 | 1.02 |
| | ACC* | 3,398 | 2.25 | 991 | 0.71 | Asp | GAU | 312 | 0.09 | 4,217 | 1.38 |
| | ACA | 133 | 0.09 | 2,075 | 1.5 | | GAC* | 6,729 | 1.91 | 1,891 | 0.62 |
| | ACG* | 2,378 | 1.57 | 495 | 0.36 | Gly | GGU | 363 | 0.13 | 2,301 | 1.35 |
| Val | GUU | 182 | 0.07 | 2,595 | 1.51 | | GGC* | 7,842 | 2.91 | 1,282 | 0.75 |
| | GUC* | 4,584 | 1.82 | 1,096 | 0.64 | | GGA | 397 | 0.15 | 2,044 | 1.19 |
| | GUA | 74 | 0.03 | 1,325 | 0.77 | | GGG* | 2,186 | 0.81 | 1,215 | 0.71 |
| | GUG* | 5,257 | 2.08 | 1,842 | 1.07 | Glu | GAA | 193 | 0.06 | 4,080 | 1.1 |
| | | | | | | | GAG* | 6,010 | 1.94 | 3,307 | 0.9 |

Codon usage was compared using Chi squared contingency test to identify optimal codons. Codons that occur significantly more often (P\0.01) are indicated with an asterisk.

TABLE 4

| | | | | | | | |
|---|---|---|---|---|---|---|---|
| TTT | F | 21.2 | (10493) | TCT | S | 18.4 | (9107) |
| TTC | F | 21.2 | (10487) | TCC | S | 12.9 | (6409) |
| TTA | L | 9.2 | (4545) | TCA | S | 15.6 | (7712) |
| TTG | L | 22.9 | (11340) | TCG | S | 4.8 | (2397) |
| CTT | L | 23.9 | (11829) | CCT | P | 18.9 | (9358) |
| CTC | L | 17.1 | (8479) | CCC | P | 10.1 | (5010) |
| CTA | L | 8.5 | (4216) | CCA | P | 19.1 | (9461) |
| CTG | L | 12.7 | (6304) | CCG | P | 4.7 | (2312) |
| ATT | I | 25.1 | (12411) | ACT | T | 17.1 | (8490) |
| ATC | I | 16.3 | (8071) | ACC | T | 14.3 | (7100) |
| ATA | I | 12.9 | (6386) | ACA | T | 14.9 | (7391) |
| ATG | M | 22.7 | (11218) | ACG | T | 4.3 | (2147) |
| GTT | V | 26.1 | (12911) | GCT | A | 26.7 | (13201) |
| GTC | V | 11.9 | (5894) | GCC | A | 16.2 | (8026) |
| GTA | V | 7.7 | (3803) | GCA | A | 21.4 | (10577) |
| GTG | V | 21.4 | (10610) | GCG | A | 6.3 | (3123) |
| TAT | Y | 15.7 | (7779) | TGT | C | 8.1 | (3995) |
| TAC | Y | 14.9 | (7367) | TGC | C | 8.0 | (3980) |
| TAA | * | 0.9 | (463) | TGA | * | 1.0 | (480) |
| TAG | * | 0.5 | (263) | TGG | W | 13.0 | (6412) |
| CAT | H | 14.0 | (6930) | CGT | R | 6.6 | (3291) |
| CAC | H | 11.6 | (5759) | CGC | R | 6.2 | (3093) |
| CAA | Q | 20.5 | (10162) | CGA | R | 4.1 | (2018) |
| CAG | Q | 16.2 | (8038) | CGG | R | 3.1 | (1510) |
| AAT | N | 22.4 | (11088) | AGT | S | 12.6 | (6237) |
| AAC | N | 22.8 | (11284) | AGC | S | 11.3 | (5594) |
| AAA | K | 26.9 | (13334) | AGA | R | 14.8 | (7337) |
| AAG | K | 35.9 | (17797) | AGG | R | 13.3 | (6574) |
| GAT | D | 32.4 | (16040) | GGT | G | 20.9 | (10353) |
| GAC | D | 20.4 | (10097) | GGC | G | 13.4 | (6650) |
| GAA | E | 33.2 | (16438) | GGA | G | 22.3 | (11022) |
| GAG | E | 33.2 | (16426) | GGG | G | 13.0 | (6431) |

[0245] A Glycine max codon usage table is shown in Table 4 and can also be found at kazusa.or.jp/codon/cgi-bin/showcodon.cgi?species=3847&aa=1&style=N, which can be accessed using the www prefix.

[0246] In some embodiments the recombinant nucleic acid molecule encoding a PtIP-83 polypeptide has maize optimized codons.

[0247] Additional sequence modifications are known to enhance gene expression in a cellular host. These include elimination of sequences encoding spurious polyadenylation signals, exon-intron splice site signals, transposon-like repeats, and other well-characterized sequences that may be deleterious to gene expression. The GC content of the sequence may be adjusted to levels average for a given cellular host, as calculated by reference to known genes expressed in the host cell. The term “host cell” as used herein refers to a cell which contains a vector and supports the replication and/or expression of the expression vector is intended. Host cells may be prokaryotic cells such as E. coli or eukaryotic cells such as yeast, insect, amphibian or mammalian cells or monocotyledonous or dicotyledonous plant cells. An example of a monocotyledonous host cell is a maize host cell. When possible, the sequence is modified to avoid PtIP-hairpin secondary mRNA structures.

[0248] The expression cassettes may additionally contain 5′ leader sequences. Such leader sequences can act to enhance translation. Translation leaders are known in the art and include: picomavirus leaders, for example, EMCV leader (Encephalomyocarditis 5′ noncoding region) (Elroy-Stein, et al., (1989) Proc. Natl. Acad. Sci. USA 86:6126-6130); potyvirus leaders, for example, TEV leader (Tobacco Etch Virus) (Gallie, et al., (1995) Gene 165(2):233-238), MDMV leader (Maize Dwarf Mosaic Virus), human immunoglobulin heavy-chain binding protein (BiP) (Macejak, et al., (1991) Nature 353:90-94); untranslated leader from the coat protein mRNA of alfalfa mosaic virus (AMV RNA 4) (Jobling, et al., (1987) Nature 325:622-625); tobacco mosaic virus leader (TMV) (Gallie, et al., (1989) in Molecular Biology of RNA, ed. Cech (Liss, New York), pp. 237-256) and maize chlorotic mottle virus leader (MCMV) (Lommel, et al., (1991) Virology 81:382-385). See also, Della-Cioppa, et al., (1987) Plant Physiol. 84:965-968. Such constructs may also contain a “signal sequence” or “leader sequence” to facilitate co-translational or post-translational transport of the peptide to certain intracellular structures such as the chloroplast (or other plastid), endoplasmic reticulum or Golgi apparatus.

[0249] “Signal sequence” as used herein refers to a sequence that is known or suspected to result in cotranslational or post-translational peptide transport across the cell membrane. In eukaryotes, this typically involves secretion into the Golgi apparatus, with some resulting glycosylation. Insecticidal toxins of bacteria are often synthesized as protoxins, which are protolytically activated in the gut of the target pest (Chang, (1987) Methods Enzymol. 153:507-516). In some embodiments, the signal sequence is located in the native sequence or may be derived from a sequence of the embodiments. “Leader sequence” as used herein refers to any sequence that when translated, results in an amino acid sequence sufficient to trigger co-translational transport of the peptide chain to a subcellular organelle. Thus, this includes leader sequences targeting transport and/or glycosylation by passage into the endoplasmic reticulum, passage to vacuoles, plastids including chloroplasts, mitochondria, and the like. Nuclear-encoded proteins targeted to the chloroplast thylakoid lumen compartment have a characteristic bipartite transit peptide, composed of a stromal targeting signal peptide and a lumen targeting signal peptide. The stromal targeting information is in the amino-proximal portion of the transit peptide. The lumen targeting signal peptide is in the carboxyl-proximal portion of the transit peptide, and contains all the information for targeting to the lumen. Recent research in proteomics of the higher plant chloroplast has achieved in the identification of numerous nuclear-encoded lumen proteins (Kieselbach et al. FEBS LETT 480:271-276, 2000; Peltier et al. Plant Cell 12:319-341, 2000; Bricker et al. Biochim. Biophys Acta 1503:350-356, 2001), the lumen targeting signal peptide of which can potentially be used in accordance with the present disclosure. About 80 proteins from Arabidopsis, as well as homologous proteins from spinach and garden pea, are reported by Kieselbach et al., Photosynthesis Research, 78:249-264, 2003. In particular, Table 2 of this publication, which is incorporated into the description herewith by reference, discloses 85 proteins from the chloroplast lumen, identified by their accession number (see also US Patent Application Publication 2009/09044298). In addition, the recently published draft version of the rice genome (Goff et al, Science 296:92-100, 2002) is a suitable source for lumen targeting signal peptide which may be used in accordance with the present disclosure.

[0250] Suitable chloroplast transit peptides (CTP) are well known to one skilled in the art also include chimeric CTPs comprising but not limited to, an N-terminal domain, a central domain or a C-terminal domain from a CTP from Oryza sativa 1-deoxy-D xyulose-5-Phosphate Synthase Oryza sativa-Superoxide dismutase Oryza sativa-soluble starch synthase Oryza sativa-NADP-dependent Malic acid enzyme Oryza sativa-Phospho-2-dehydro-3-deoxyheptonate Aldolase 2 Oryza sativa-L-Ascorbate peroxidase 5 Oryza sativa-Phosphoglucan water dikinase, Zea Mays ssRUBISCO, Zea Mays-beta-glucosidase, Zea Mays-Malate dehydrogenase, Zea Mays Thioredoxin M-type US Patent Application Publication 2012/0304336).

[0251] The PtIP-83 polypeptide gene to be targeted to the chloroplast may be optimized for expression in the chloroplast to account for differences in codon usage between the plant nucleus and this organelle. In this manner, the nucleic acids of interest may be synthesized using chloroplast-preferred codons. See, for example, U.S. Pat. No. 5,380,831, herein incorporated by reference.

[0252] In preparing the expression cassette, the various DNA fragments may be manipulated so as to provide for the DNA sequences in the proper orientation and, as appropriate, in the proper reading frame. Toward this end, adapters or linkers may be employed to join the DNA fragments or other manipulations may be involved to provide for convenient restriction sites, removal of superfluous DNA, removal of restriction sites or the like. For this purpose, in vitro mutagenesis, primer repair, restriction, annealing, resubstitutions, e.g., transitions and transversions, may be involved.

[0253] A number of promoters can be used in the practice of the embodiments. The promoters can be selected based on the desired outcome. The nucleic acids can be combined with constitutive, tissue-preferred, inducible or other promoters for expression in the host organism. Suitable constitutive promoters for use in a plant host cell include, for example, the core promoter of the Rsyn7 promoter and other constitutive promoters disclosed in WO 1999/43838 and U.S. Pat. No. 6,072,050; the core CaMV 35S promoter (Odell, et al., (1985) Nature 313:810-812); rice actin (McElroy, et al., (1990) Plant Cell 2:163-171); ubiquitin (Christensen, et al., (1989) Plant Mol. Biol. 12:619-632 and Christensen, et al., (1992) Plant Mol. Biol. 18:675-689); pEMU (Last, et al., (1991) Theor. Appl. Genet. 81:581-588); MAS (Velten, et al., (1984) EMBO J. 3:2723-2730); ALS promoter (U.S. Pat. No. 5,659,026) and the like. Other constitutive promoters include, for example, those discussed in U.S. Pat. Nos. 5,608,149; 5,608,144; 5,604,121; 5,569,597; 5,466,785; 5,399,680; 5,268,463; 5,608,142 and 6,177,611.

[0254] Depending on the desired outcome, it may be beneficial to express the gene from an inducible promoter. Of particular interest for regulating the expression of the nucleotide sequences of the embodiments in plants are wound-inducible promoters. Such wound-inducible promoters, may respond to damage caused by insect feeding, and include potato proteinase inhibitor (pin II) gene (Ryan, (1990) Ann. Rev. Phytopath. 28:425-449; Duan, et al., (1996) Nature Biotechnology 14:494-498); wun1 and wun2, U.S. Pat. No. 5,428,148; win1 and win2 (Stanford, et al., (1989) Mol. Gen. Genet. 215:200-208); systemin (McGurI, et al., (1992) Science 225:1570-1573); WIP1 (Rohmeier, et al., (1993) Plant Mol. Biol. 22:783-792; Eckelkamp, et al., (1993) FEBS Letters 323:73-76); MPI gene (Corderok, et al., (1994) Plant J. 6(2):141-150) and the like, herein incorporated by reference.

[0255] Additionally, pathogen-inducible promoters may be employed in the methods and nucleotide constructs of the embodiments. Such pathogen-inducible promoters include those from pathogenesis-related proteins (PR proteins), which are induced following infection by a pathogen; e.g., PR proteins, SAR proteins, beta-1,3-glucanase, chitinase, etc. See, for example, Redolfi, et al., (1983) Neth. J. Plant Pathol. 89:245-254; Uknes, et al., (1992) Plant Cell 4: 645-656 and Van Loon, (1985) Plant Mol. Virol. 4:111-116. See also, WO 1999/43819, herein incorporated by reference.

[0256] Of interest are promoters that are expressed locally at or near the site of pathogen infection. See, for example, Marineau, et al., (1987) Plant Mol. Biol. 9:335-342; Matton, et al., (1989) Molecular Plant-Microbe Interactions 2:325-331; Somsisch, et al., (1986) Proc. Natl. Acad. Sci. USA 83:2427-2430; Somsisch, et al., (1988) Mol. Gen. Genet. 2:93-98 and Yang, (1996) Proc. Natl. Acad. Sci. USA 93:14972-14977. See also, Chen, et al., (1996) Plant J. 10:955-966; Zhang, et al., (1994) Proc. Natl. Acad. Sci. USA 91:2507-2511; Warner, et al., (1993) Plant J. 3:191-201; Siebertz, et al., (1989) Plant Cell 1:961-968; U.S. Pat. No. 5,750,386 (nematode-inducible) and the references cited therein. Of particular interest is the inducible promoter for the maize PRms gene, whose expression is induced by the pathogen Fusarium moniliforme (see, for example, Cordero, et al., (1992) Physiol. Mol. Plant Path. 41:189-200).

[0257] Chemical-regulated promoters can be used to modulate the expression of a gene in a plant through the application of an exogenous chemical regulator. Depending upon the objective, the promoter may be a chemical-inducible promoter, where application of the chemical induces gene expression or a chemical-repressible promoter, where application of the chemical represses gene expression. Chemical-inducible promoters are known in the art and include, but are not limited to, the maize In2-2 promoter, which is activated by benzenesulfonamide herbicide safeners, the maize GST promoter, which is activated by hydrophobic electrophilic compounds that are used as pre-emergent herbicides, and the tobacco PR-1a promoter, which is activated by salicylic acid. Other chemical-regulated promoters of interest include steroid-responsive promoters (see, for example, the glucocorticoid-inducible promoter in Schena, et al., (1991) Proc. Natl. Acad. Sci. USA 88:10421-10425 and McNellis, et al., (1998) Plant J. 14(2):247-257) and tetracycline-inducible and tetracycline-repressible promoters (see, for example, Gatz, et al., (1991) Mol. Gen. Genet. 227:229-237 and U.S. Pat. Nos. 5,814,618 and 5,789,156), herein incorporated by reference.

[0258] Tissue-preferred promoters can be utilized to target enhanced PtIP-83 polypeptide expression within a particular plant tissue. Tissue-preferred promoters include those discussed in Yamamoto, et al., (1997) Plant J. 12(2)255-265; Kawamata, et al., (1997) Plant Cell Physiol. 38(7):792-803; Hansen, et al., (1997) Mol. Gen Genet. 254(3):337-343; Russell, et al., (1997) Transgenic Res. 6(2):157-168; Rinehart, et al., (1996) Plant Physiol. 112(3):1331-1341; Van Camp, et al., (1996) Plant Physiol. 112(2):525-535; Canevascini, et al., (1996) Plant Physiol. 112(2):513-524; Yamamoto, et al., (1994) Plant Cell Physiol. 35(5):773-778; Lam, (1994) Results Probl. Cell Differ. 20:181-196; Orozco, et al., (1993) Plant Mol Biol. 23(6):1129-1138; Matsuoka, et al., (1993) Proc Natl. Acad. Sci. USA 90(20):9586-9590 and Guevara-Garcia, et al., (1993) Plant J. 4(3):495-505. Such promoters can be modified, if necessary, for weak expression.

[0259] Leaf-preferred promoters are known in the art. See, for example, Yamamoto, et al., (1997) Plant J. 12(2):255-265; Kwon, et al., (1994) Plant Physiol. 105:357-67; Yamamoto, et al., (1994) Plant Cell Physiol. 35(5):773-778; Gotor, et al., (1993) Plant J. 3:509-18; Orozco, et al., (1993) Plant Mol. Biol. 23(6):1129-1138 and Matsuoka, et al., (1993) Proc. Natl. Acad. Sci. USA 90(20):9586-9590.

[0260] Root-preferred or root-specific promoters are known and can be selected from the many available from the literature or isolated de novo from various compatible species. See, for example, Hire, et al., (1992) Plant Mol. Biol. 20(2):207-218 (soybean root-specific glutamine synthetase gene); Keller and Baumgartner, (1991) Plant Cell 3(10):1051-1061 (root-specific control element in the GRP 1.8 gene of French bean); Sanger, et al., (1990) Plant Mol. Biol. 14(3):433-443 (root-specific promoter of the mannopine synthase (MAS) gene of Agrobacterium tumefaciens) and Miao, et al., (1991) Plant Cell 3(1):11-22 (full-length cDNA clone encoding cytosolic glutamine synthetase (GS), which is expressed in roots and root nodules of soybean). See also, Bogusz, et al., (1990) Plant Cell 2(7):633-641, where two root-specific promoters isolated from hemoglobin genes from the nitrogen-fixing nonlegume Parasponia andersonii and the related non-nitrogen-fixing nonlegume Trema tomentosa are described. The promoters of these genes were linked to a R-glucuronidase reporter gene and introduced into both the nonlegume Nicotiana tabacum and the legume Lotus comiculatus, and in both instances root-specific promoter activity was preserved. Leach and Aoyagi, (1991) describe their analysis of the promoters of the highly expressed rolC and rolD root-inducing genes of Agrobacterium rhizogenes (see, Plant Science (Umerick) 79(1):69-76). They concluded that enhancer and tissue-preferred DNA determinants are dissociated in those promoters. Teer, et al., (1989) used gene fusion to lacZ to show that the Agrobacterium T-DNA gene encoding octopine synthase is especially active in the epidermis of the root tip and that the TR2′ gene is root specific in the intact plant and stimulated by wounding in leaf tissue, an especially desirable combination of characteristics for use with an insecticidal or larvicidal gene (see, EMBO J. 8(2):343-350). The TR1′ gene fused to nptll (neomycin phosphotransferase II) showed similar characteristics. Additional root-preferred promoters include the VfENOD-GRP3 gene promoter (Kuster, et al., (1995) Plant Mol. Biol. 29(4):759-772) and rolB promoter (Capana, et al., (1994) Plant Mol. Biol. 25(4):681-691. See also, U.S. Pat. Nos. 5,837,876; 5,750,386; 5,633,363; 5,459,252; 5,401,836; 5,110,732 and 5,023,179. Arabidopsis thaliana root-preferred regulatory sequences are disclosed in US20130117883.

[0261] “Seed-preferred” promoters include both “seed-specific” promoters (those promoters active during seed development such as promoters of seed storage proteins) as well as “seed-germinating” promoters (those promoters active during seed germination). See, Thompson, et al., (1989) BioEssays 10:108, herein incorporated by reference. Such seed-preferred promoters include, but are not limited to, Cim1 (cytokinin-induced message); cZ19B1 (maize 19 kDa zein); and milps (myo-inositol-1-phosphate synthase) (see, U.S. Pat. No. 6,225,529, herein incorporated by reference). Gamma-zein and Glb-1 are endosperm-specific promoters. For dicots, seed-specific promoters include, but are not limited to, Kunitz trypsin inhibitor 3 (KTi3) (Jofuku and Goldberg, (1989) Plant Cell 1:1079-1093), bean R-phaseolin, napin, R-conglycinin, glycinin 1, soybean lectin, cruciferin, and the like. For monocots, seed-specific promoters include, but are not limited to, maize 15 kDa zein, 22 kDa zein, 27 kDa zein, g-zein, waxy, shrunken 1, shrunken 2, globulin 1, etc. See also, WO 2000/12733, where seed-preferred promoters from end1 and end2 genes are disclosed; herein incorporated by reference. In dicots, seed specific promoters include but are not limited to seed coat promoter from Arabidopsis, pBAN; and the early seed promoters from Arabidopsis, p26, p63, and p63tr (U.S. Pat. Nos. 7,294,760 and 7,847,153). A promoter that has “preferred” expression in a particular tissue is expressed in that tissue to a greater degree than in at least one other plant tissue. Some tissue-preferred promoters show expression almost exclusively in the particular tissue.

[0262] Where low level expression is desired, weak promoters will be used. Generally, the term “weak promoter” as used herein refers to a promoter that drives expression of a coding sequence at a low level. By low level expression at levels of between about 1/1000 transcripts to about 1/100,000 transcripts to about 1/500,000 transcripts is intended. Alternatively, it is recognized that the term “weak promoters” also encompasses promoters that drive expression in only a few cells and not in others to give a total low level of expression. Where a promoter drives expression at unacceptably high levels, portions of the promoter sequence can be deleted or modified to decrease expression levels.

[0263] Such weak constitutive promoters include, for example the core promoter of the Rsyn7 promoter (WO 1999/43838 and U.S. Pat. No. 6,072,050), the core 35S CaMV promoter, and the like. Other constitutive promoters include, for example, those disclosed in U.S. Pat. Nos. 5,608,149; 5,608,144; 5,604,121; 5,569,597; 5,466,785; 5,399,680; 5,268,463; 5,608,142 and 6,177,611, herein incorporated by reference.

[0264] The above list of promoters is not meant to be limiting. Any appropriate promoter can be used in the embodiments.

[0265] Generally, the expression cassette will comprise a selectable marker gene for the selection of transformed cells. Selectable marker genes are utilized for the selection of transformed cells or tissues. Marker genes include genes encoding antibiotic resistance, such as those encoding neomycin phosphotransferase II (NEO) and hygromycin phosphotransferase (HPT), as well as genes conferring resistance to herbicidal compounds, such as glufosinate ammonium, bromoxynil, imidazolinones and 2,4-dichlorophenoxyacetate (2,4-D). Additional examples of suitable selectable marker genes include, but are not limited to, genes encoding resistance to chloramphenicol (Herrera Estrella, et al., (1983) EMBO J. 2:987-992); methotrexate (Herrera Estrella, et al., (1983) Nature 303:209-213 and Meijer, et al., (1991) Plant Mol. Biol. 16:807-820); streptomycin (Jones, et al., (1987) Mol. Gen. Genet. 210:86-91); spectinomycin (Bretagne-Sagnard, et al., (1996) Transgenic Res. 5:131-137); bleomycin (Hille, et al., (1990) Plant Mol. Biol. 7:171-176); sulfonamide (Guerineau, et al., (1990) Plant Mol. Biol. 15:127-136); bromoxynil (Stalker, et al., (1988) Science 242:419-423); glyphosate (Shaw, et al., (1986) Science 233:478-481 and U.S. patent application Ser. Nos. 10/004,357 and 10/427,692); phosphinothricin (DeBlock, et al., (1987) EMBO J. 6:2513-2518). See generally, Yarranton, (1992) Curr. Opin. Biotech. 3:506-511; Christopherson, et al., (1992) Proc. Natl. Acad. Sci. USA 89:6314-6318; Yao, et al., (1992) Cell 71:63-72; Reznikoff, (1992) Mol. Microbiol. 6:2419-2422; Barkley, et al., (1980) in The Operon, pp. 177-220; Hu, et al., (1987) Cell 48:555-566; Brown, et al., (1987) Cell 49:603-612; Figge, et al., (1988) Cell 52:713-722; Deuschle, et al., (1989) Proc. Natl. Acad. Sci. USA 86:5400-5404; Fuerst, et al., (1989) Proc. Natl. Acad. Sci. USA 86:2549-2553; Deuschle, et al., (1990) Science 248:480-483; Gossen, (1993) Ph.D. Thesis, University of Heidelberg; Reines, et al., (1993) Proc. Natl. Acad. Sci. USA 90:1917-1921; Labow, et al., (1990) Mol. Cell. Biol. 10:3343-3356; Zambretti, et al., (1992) Proc. Natl. Acad. Sci. USA 89:3952-3956; Baim, et al., (1991) Proc. Natl. Acad. Sci. USA 88:5072-5076; Wyborski, et al., (1991) Nucleic Acids Res. 19:4647-4653; Hillenand-Wissman, (1989) Topics Mol. Struc. Biol. 10:143-162; Degenkolb, et al., (1991) Antimicrob. Agents Chemother. 35:1591-1595; Kleinschnidt, et al., (1988) Biochemistry 27:1094-1104; Bonin, (1993) Ph.D. Thesis, University of Heidelberg; Gossen, et al., (1992) Proc. Natl. Acad. Sci. USA 89:5547-5551; Oliva, et al., (1992) Antimicrob. Agents Chemother. 36:913-919; Hlavka, et al., (1985) Handbook of Experimental Pharmacology, Vol. 78 (Springer-Verlag, Berlin) and Gill, et al., (1988) Nature 334:721-724. Such disclosures are herein incorporated by reference.

[0266] The above list of selectable marker genes is not meant to be limiting. Any selectable marker gene can be used in the embodiments.

### Plant Transformation

[0267] The methods of the embodiments involve introducing a polypeptide or polynucleotide into a plant. “Introducing” is as used herein means presenting to the plant the polynucleotide or polypeptide in such a manner that the sequence gains access to the interior of a cell of the plant. The methods of the embodiments do not depend on a particular method for introducing a polynucleotide or polypeptide into a plant, only that the polynucleotide or polypeptides gains access to the interior of at least one cell of the plant. Methods for introducing polynucleotide or polypeptides into plants are known in the art including, but not limited to, stable transformation methods, transient transformation methods, and virus-mediated methods.

[0268] “Stable transformation” is as used herein means that the nucleotide construct introduced into a plant integrates into the genome of the plant and is capable of being inherited by the progeny thereof. “Transient transformation” as used herein means that a polynucleotide is introduced into the plant and does not integrate into the genome of the plant or a polypeptide is introduced into a plant. “Plant” as used herein refers to whole plants, plant organs (e.g., leaves, stems, roots, etc.), seeds, plant cells, propagules, embryos and progeny of the same. Plant cells can be differentiated or undifferentiated (e.g. callus, suspension culture cells, protoplasts, leaf cells, root cells, phloem cells and pollen).

[0269] Transformation protocols as well as protocols for introducing nucleotide sequences into plants may vary depending on the type of plant or plant cell, i.e., monocot or dicot, targeted for transformation. Suitable methods of introducing nucleotide sequences into plant cells and subsequent insertion into the plant genome include microinjection (Crossway, et al., (1986) Biotechniques 4:320-334), electroporation (Riggs, et al., (1986) Proc. Natl. Acad. Sci. USA 83:5602-5606), Agrobacterium-mediated transformation (U.S. Pat. Nos. 5,563,055 and 5,981,840), direct gene transfer (Paszkowski, et al., (1984) EMBO J. 3:2717-2722) and ballistic particle acceleration (see, for example, U.S. Pat. Nos. 4,945,050; 5,879,918; 5,886,244 and 5,932,782; Tomes, et al., (1995) in Plant Cell, Tissue, and Organ Culture: Fundamental Methods, ed. Gamborg and Phillips, (Springer-Verlag, Berlin) and McCabe, et al., (1988) Biotechnology 6:923-926) and Lecl transformation (WO 00/28058). For potato transformation see, Tu, et al., (1998) Plant Molecular Biology 37:829-838 and Chong, et al., (2000) Transgenic Research 9:71-78. Additional transformation procedures can be found in Weissinger, et al., (1988) Ann. Rev. Genet. 22:421-477; Sanford, et al., (1987) Particulate Science and Technology 5:27-37 (onion); Christou, et al., (1988) Plant Physiol. 87:671-674 (soybean); McCabe, et al., (1988) Bio/Technology 6:923-926 (soybean); Finer and McMullen, (1991) In Vitro Cell Dev. Biol. 27P:175-182 (soybean); Singh, et al., (1998) Theor. Appl. Genet. 96:319-324 (soybean); Datta, et al., (1990) Biotechnology 8:736-740 (rice); Klein, et al., (1988) Proc. Natl. Acad. Sci. USA 85:4305-4309 (maize); Klein, et al., (1988) Biotechnology 6:559-563 (maize); U.S. Pat. Nos. 5,240,855; 5,322,783 and 5,324,646; Klein, et al., (1988) Plant Physiol. 91:440-444 (maize); Fromm, et al., (1990) Biotechnology 8:833-839 (maize); Hooykaas-Van Slogteren, et al., (1984) Nature (London) 311:763-764; U.S. Pat. No. 5,736,369 (cereals); Bytebier, et al., (1987) Proc. Natl. Acad. Sci. USA 84:5345-5349 (Liliaceae); De Wet, et al., (1985) in The Experimental Manipulation of Ovule Tissues, ed. Chapman, et al., (Longman, New York), pp. 197-209 (pollen); Kaeppler, et al., (1990) Plant Cell Reports 9:415-418 and Kaeppler, et al., (1992) Theor. Appl. Genet. 84:560-566 (whisker-mediated transformation); D'Halluin, et al., (1992) Plant Cell 4:1495-1505 (electroporation); Li, et al., (1993) Plant Cell Reports 12:250-255 and Christou and Ford, (1995) Annals of Botany 75:407-413 (rice); Osjoda, et al., (1996) Nature Biotechnology 14:745-750 (maize via Agrobacterium tumefaciens); all of which are herein incorporated by reference.

[0270] In specific embodiments, the sequences of the embodiments can be provided to a plant using a variety of transient transformation methods. Such transient transformation methods include, but are not limited to, the introduction of the PtIP-83 polynucleotide or variants and fragments thereof directly into the plant or the introduction of the PtIP-83 polypeptide transcript into the plant. Such methods include, for example, microinjection or particle bombardment. See, for example, Crossway, et al., (1986) Mol Gen. Genet. 202:179-185; Nomura, et al., (1986) Plant Sci. 44:53-58; Hepler, et al., (1994) Proc. Natl. Acad. Sci. 91:2176-2180 and Hush, et al., (1994) The Journal of Cell Science 107:775-784, all of which are herein incorporated by reference. Alternatively, the PtIP-83 polypeptide polynucleotide can be transiently transformed into the plant using techniques known in the art. Such techniques include viral vector system and the precipitation of the polynucleotide in a manner that precludes subsequent release of the DNA. Thus, transcription from the particle-bound DNA can occur, but the frequency with which it is released to become integrated into the genome is greatly reduced. Such methods include the use of particles coated with polyethylimine (PEI; Sigma #P3143).

[0271] Methods are known in the art for the targeted insertion of a polynucleotide at a specific location in the plant genome. In one embodiment, the insertion of the polynucleotide at a desired genomic location is achieved using a site-specific recombination system. See, for example, WO 1999/25821, WO 1999/25854, WO 1999/25840, WO 1999/25855 and WO 1999/25853, all of which are herein incorporated by reference. Briefly, the polynucleotide of the embodiments can be contained in transfer cassette flanked by two non-identical recombination sites. The transfer cassette is introduced into a plant have stably incorporated into its genome a target site which is flanked by two non-identical recombination sites that correspond to the sites of the transfer cassette. An appropriate recombinase is provided and the transfer cassette is integrated at the target site. The polynucleotide of interest is thereby integrated at a specific chromosomal position in the plant genome.

[0272] Plant transformation vectors may be comprised of one or more DNA vectors needed for achieving plant transformation. For example, it is a common practice in the art to utilize plant transformation vectors that are comprised of more than one contiguous DNA segment. These vectors are often referred to in the art as “binary vectors”. Binary vectors as well as vectors with helper plasmids are most often used for Agrobacterium-mediated transformation, where the size and complexity of DNA segments needed to achieve efficient transformation is quite large, and it is advantageous to separate functions onto separate DNA molecules. Binary vectors typically contain a plasmid vector that contains the cis-acting sequences required for T-DNA transfer (such as left border and right border), a selectable marker that is engineered to be capable of expression in a plant cell, and a “gene of interest” (a gene engineered to be capable of expression in a plant cell for which generation of transgenic plants is desired). Also present on this plasmid vector are sequences required for bacterial replication. The cis-acting sequences are arranged in a fashion to allow efficient transfer into plant cells and expression therein. For example, the selectable marker gene and the pesticidal gene are located between the left and right borders. Often a second plasmid vector contains the trans-acting factors that mediate T-DNA transfer from Agrobacterium to plant cells. This plasmid often contains the virulence functions (Vir genes) that allow infection of plant cells by Agrobacterium, and transfer of DNA by cleavage at border sequences and vir-mediated DNA transfer, as is understood in the art (Hellens and Mullineaux, (2000) Trends in Plant Science 5:446-451). Several types of Agrobacterium strains (e.g. LBA4404, GV3101, EHA101, EHA105, etc.) can be used for plant transformation. The second plasmid vector is not necessary for transforming the plants by other methods such as microprojection, microinjection, electroporation, polyethylene glycol, etc.

[0273] In general, plant transformation methods involve transferring heterologous DNA into target plant cells (e.g., immature or mature embryos, suspension cultures, undifferentiated callus, protoplasts, etc.), followed by applying a maximum threshold level of appropriate selection (depending on the selectable marker gene) to recover the transformed plant cells from a group of untransformed cell mass. Following integration of heterologous foreign DNA into plant cells, one then applies a maximum threshold level of appropriate selection in the medium to kill the untransformed cells and separate and proliferate the putatively transformed cells that survive from this selection treatment by transferring regularly to a fresh medium. By continuous passage and challenge with appropriate selection, one identifies and proliferates the cells that are transformed with the plasmid vector. Molecular and biochemical methods can then be used to confirm the presence of the integrated heterologous gene of interest into the genome of the transgenic plant.

[0274] Explants are typically transferred to a fresh supply of the same medium and cultured routinely. Subsequently, the transformed cells are differentiated into shoots after placing on regeneration medium supplemented with a maximum threshold level of selecting agent. The shoots are then transferred to a selective rooting medium for recovering rooted shoot or plantlet. The transgenic plantlet then grows into a mature plant and produces fertile seeds (e.g., Hiei, et al., (1994) The Plant Journal 6:271-282; Ishida, et al., (1996) Nature Biotechnology 14:745-750). Explants are typically transferred to a fresh supply of the same medium and cultured routinely. A general description of the techniques and methods for generating transgenic plants are found in Ayres and Park, (1994) Critical Reviews in Plant Science 13:219-239 and Bommineni and Jauhar, (1997) Maydica 42:107-120. Since the transformed material contains many cells; both transformed and non-transformed cells are present in any piece of subjected target callus or tissue or group of cells. The ability to kill non-transformed cells and allow transformed cells to proliferate results in transformed plant cultures. Often, the ability to remove non-transformed cells is a limitation to rapid recovery of transformed plant cells and successful generation of transgenic plants.

[0275] The cells that have been transformed may be grown into plants in accordance with conventional ways. See, for example, McCormick, et al., (1986) Plant Cell Reports 5:81-84. These plants may then be grown, and either pollinated with the same transformed strain or different strains, and the resulting hybrid having constitutive or inducible expression of the desired phenotypic characteristic identified. Two or more generations may be grown to ensure that expression of the desired phenotypic characteristic is stably maintained and inherited and then seeds harvested to ensure that expression of the desired phenotypic characteristic has been achieved.

[0276] The nucleotide sequences of the embodiments may be provided to the plant by contacting the plant with a virus or viral nucleic acids. Generally, such methods involve incorporating the nucleotide construct of interest within a viral DNA or RNA molecule. It is recognized that the recombinant proteins of the embodiments may be initially synthesized as part of a viral polyprotein, which later may be processed by proteolysis in vivo or in vitro to produce the desired PtIP-83 polypeptide. It is also recognized that such a viral polyprotein, comprising at least a portion of the amino acid sequence of a PtIP-83 of the embodiments, may have the desired pesticidal activity. Such viral polyproteins and the nucleotide sequences that encode for them are encompassed by the embodiments. Methods for providing plants with nucleotide constructs and producing the encoded proteins in the plants, which involve viral DNA or RNA molecules are known in the art. See, for example, U.S. Pat. Nos. 5,889,191; 5,889,190; 5,866,785; 5,589,367 and 5,316,931; herein incorporated by reference.

[0277] Methods for transformation of chloroplasts are known in the art. See, for example, Svab, et al., (1990) Proc. Natl. Acad. Sci. USA 87:8526-8530; Svab and Maliga, (1993) Proc. Natl. Acad. Sci. USA 90:913-917; Svab and Maliga, (1993) EMBO J. 12:601-606. The method relies on particle gun delivery of DNA containing a selectable marker and targeting of the DNA to the plastid genome through homologous recombination. Additionally, plastid transformation can be accomplished by transactivation of a silent plastid-bome transgene by tissue-preferred expression of a nuclear-encoded and plastid-directed RNA polymerase. Such a system has been reported in McBride, et al., (1994) Proc. Natl. Acad. Sci. USA 91:7301-7305.

[0278] The embodiments further relate to plant-propagating material of a transformed plant of the embodiments including, but not limited to, seeds, tubers, corms, bulbs, leaves and cuttings of roots and shoots.

[0279] The embodiments may be used for transformation of any plant species, including, but not limited to, monocots and dicots. Examples of plants of interest include, but are not limited to, corn (Zea mays), Brassica sp. (e.g., B. napus, B. rapa, B. juncea), particularly those Brassica species useful as sources of seed oil, alfalfa (Medicago sativa), rice (Oryza sativa), rye (Secale cereale), sorghum (Sorghum bicolor, Sorghum vulgare), millet (e.g., pearl millet (Pennisetum glaucum), proso millet (Panicum miliaceum), foxtail millet (Setaria italica), finger millet (Eleusine coracana)), sunflower (Helianthus annuus), safflower (Carthamus tinctorius), wheat (Triticum aestivum), soybean (Glycine max), tobacco (Nicotiana tabacum), potato (Solanum tuberosum), peanuts (Arachis hypogaea), cotton (Gossypium barbadense, Gossypium hirsutum), sweet potato (Ipomoea batatus), cassava (Manihot esculenta), coffee (Coffea spp.), coconut (Cocos nucifera), pineapple (Ananas comosus), citrus trees (Citrus spp.), cocoa (Theobroma cacao), tea (Camellia sinensis), banana (Musa spp.), avocado (Persea americana), fig (Ficus casica), guava (Psidium guajava), mango (Mangifera indica), olive (Olea europaea), papaya (Carica papaya), cashew (Anacardium occidentale), macadamia (Macadamia integrifolia), almond (Prunus amygdalus), sugar beets (Beta vulgaris), sugarcane (Saccharum spp.), oats, barley, vegetables omamentals, and conifers.

[0280] Vegetables include tomatoes (Lycopersicon esculentum), lettuce (e.g., Lactuca sativa), green beans (Phaseolus vulgaris), lima beans (Phaseolus limensis), peas (Lathyrus spp.), and members of the genus Cucumis such as cucumber (C. sativus), cantaloupe (C. cantalupensis), and musk melon (C. melo). Ornamentals include azalea (Rhododendron spp.), hydrangea (Macrophylla hydrangea), hibiscus (Hibiscus rosasanensis), roses (Rosa spp.), tulips (Tulipa spp.), daffodils (Narcissus spp.), petunias (Petunia hybrida), carnation (Dianthus caryophyllus), poinsettia (Euphorbia pulcherrima), and chrysanthemum. Conifers that may be employed in practicing the embodiments include, for example, pines such as loblolly pine (Pinus taeda), slash pine (Pinus elliotii), ponderosa pine (Pinus ponderosa), lodgepole pine (Pinus contorta), and Monterey pine (Pinus radiata); Douglas-fir (Pseudotsuga menziesii); Western hemlock (Tsuga canadensis); Sitka spruce (Picea glauca); redwood (Sequoia sempervirens); true firs such as silver fir (Abies amabilis) and balsam fir (Abies balsamea); and cedars such as Western red cedar (Thuja plicata) and Alaska yellow-cedar (Chamaecyparis nootkatensis). Plants of the embodiments include crop plants (for example, corn, alfalfa, sunflower, Brassica, soybean, cotton, safflower, peanut, sorghum, wheat, millet, tobacco, etc.), such as corn and soybean plants.

[0281] Turf grasses include, but are not limited to: annual bluegrass (Poa annua); annual ryegrass (Lolium multiflorum); Canada bluegrass (Poa compressa); Chewing's fescue (Festuca rubra); colonial bentgrass (Agrostis tenuis); creeping bentgrass (Agrostis palustris); crested wheatgrass (Agropyron desertorum); fairway wheatgrass (Agropyron cristatum); hard fescue (Festuca longifolia); Kentucky bluegrass (Poa pratensis); orchardgrass (Dactylis glomerata); perennial ryegrass (Lolium perenne); red fescue (Festuca rubra); redtop (Agrostis alba); rough bluegrass (Poa trivialis); sheep fescue (Festuca ovina); smooth bromegrass (Bromus inermis); tall fescue (Festuca arundinacea); timothy (Phleum pratense); velvet bentgrass (Agrostis canina); weeping alkaligrass (Puccinellia distans); western wheatgrass (Agropyron smithii); Bermuda grass (Cynodon spp.); St. Augustine grass (Stenotaphrum secundatum); zoysia grass (Zoysia spp.); Bahia grass (Paspalum notatum); carpet grass (Axonopus affinis); centipede grass (Eremochloa ophiuroides); kikuyu grass (Pennisetum clandesinum); seashore paspalum (Paspalum vaginatum); blue gramma (Bouteloua gracilis); buffalo grass (Buchloe dactyloids); sideoats gramma (Bouteloua curtipendula).

[0282] Plants of interest include grain plants that provide seeds of interest, oil-seed plants, and leguminous plants. Seeds of interest include grain seeds, such as corn, wheat, barley, rice, sorghum, rye, millet, etc. Oil-seed plants include cotton, soybean, safflower, sunflower, Brassica, maize, alfalfa, palm, coconut, flax, castor, olive, etc. Leguminous plants include beans and peas. Beans include guar, locust bean, fenugreek, soybean, garden beans, cowpea, mungbean, lima bean, fava bean, lentils, chickpea, etc.

### Evaluation of Plant Transformation

[0283] Following introduction of heterologous foreign DNA into plant cells, the transformation or integration of heterologous gene in the plant genome is confirmed by various methods such as analysis of nucleic acids, proteins and metabolites associated with the integrated gene.

[0284] PCR analysis is a rapid method to screen transformed cells, tissue or shoots for the presence of incorporated gene at the earlier stage before transplanting into the soil (Sambrook and Russell, (2001) Molecular Cloning: A Laboratory Manual. Cold Spring Harbor Laboratory Press, Cold Spring Harbor, NY). PCR is carried out using oligonucleotide primers specific to the gene of interest or Agrobacterium vector background, etc.

[0285] Plant transformation may be confirmed by Southern blot analysis of genomic DNA (Sambrook and Russell, (2001) supra). In general, total DNA is extracted from the transformant, digested with appropriate restriction enzymes, fractionated in an agarose gel and transferred to a nitrocellulose or nylon membrane. The membrane or “blot” is then probed with, for example, radiolabeled 32P target DNA fragment to confirm the integration of introduced gene into the plant genome according to standard techniques (Sambrook and Russell, (2001) supra).

[0286] In Northern blot analysis, RNA is isolated from specific tissues of transformant, fractionated in a formaldehyde agarose gel, and blotted onto a nylon filter according to standard procedures that are routinely used in the art (Sambrook and Russell, (2001) supra). Expression of RNA encoded by the pesticidal gene is then tested by hybridizing the filter to a radioactive probe derived from a pesticidal gene, by methods known in the art (Sambrook and Russell, (2001) supra).

[0287] Western blot, biochemical assays and the like may be carried out on the transgenic plants to confirm the presence of protein encoded by the pesticidal gene by standard procedures (Sambrook and Russell, 2001, supra) using antibodies that bind to one or more epitopes present on the PtIP-83 polypeptide.

### Stacking of Traits in Transgenic Plant

[0288] Transgenic plants may comprise a stack of one or more insecticidal polynucleotides disclosed herein with one or more additional polynucleotides resulting in the production or suppression of multiple polypeptide sequences. Transgenic plants comprising stacks of polynucleotide sequences can be obtained by either or both of traditional breeding methods or through genetic engineering methods. These methods include, but are not limited to, breeding individual lines each comprising a polynucleotide of interest, transforming a transgenic plant comprising a gene disclosed herein with a subsequent gene and co-transformation of genes into a single plant cell. As used herein, the term “stacked” includes having the multiple traits present in the same plant (i.e., both traits are incorporated into the nuclear genome, one trait is incorporated into the nuclear genome and one trait is incorporated into the genome of a plastid or both traits are incorporated into the genome of a plastid). In one non-limiting example, “stacked traits” comprise a molecular stack where the sequences are physically adjacent to each other. A trait, as used herein, refers to the phenotype derived from a particular sequence or groups of sequences. Co-transformation of genes can be carried out using single transformation vectors comprising multiple genes or genes carried separately on multiple vectors. If the sequences are stacked by genetically transforming the plants, the polynucleotide sequences of interest can be combined at any time and in any order. The traits can be introduced simultaneously in a co-transformation protocol with the polynucleotides of interest provided by any combination of transformation cassettes. For example, if two sequences will be introduced, the two sequences can be contained in separate transformation cassettes (trans) or contained on the same transformation cassette (cis). Expression of the sequences can be driven by the same promoter or by different promoters. In certain cases, it may be desirable to introduce a transformation cassette that will suppress the expression of the polynucleotide of interest. This may be combined with any combination of other suppression cassettes or overexpression cassettes to generate the desired combination of traits in the plant. It is further recognized that polynucleotide sequences can be stacked at a desired genomic location using a site-specific recombination system. See, for example, WO 1999/25821, WO 1999/25854, WO 1999/25840, WO 1999/25855 and WO 1999/25853, all of which are herein incorporated by reference.

[0289] In some embodiments the polynucleotides encoding the PtIP-83 polypeptide disclosed herein, alone or stacked with one or more additional insect resistance traits can be stacked with one or more additional input traits (e.g., herbicide resistance, fungal resistance, virus resistance, stress tolerance, disease resistance, male sterility, stalk strength, and the like) or output traits (e.g., increased yield, modified starches, improved oil profile, balanced amino acids, high lysine or methionine, increased digestibility, improved fiber quality, drought resistance, and the like). Thus, the polynucleotide embodiments can be used to provide a complete agronomic package of improved crop quality with the ability to flexibly and cost effectively control any number of agronomic pests.

[0290] Transgenes useful for stacking include but are not limited to:

1. Transgenes that Confer Resistance to Insects or Disease and that Encode:

[0291] (A) Plant disease resistance genes. Plant defenses are often activated by specific interaction between the product of a disease resistance gene (R) in the plant and the product of a corresponding avirulence (Avr) gene in the pathogen. A plant variety can be transformed with cloned resistance gene to engineer plants that are resistant to specific pathogen strains. See, for example, Jones, et al., (1994) Science 266:789 (cloning of the tomato Cf-9 gene for resistance to Cladosporium fulvum); Martin, et al., (1993) Science 262:1432 (tomato Pto gene for resistance to Pseudomonas syringae pv. tomato encodes a protein kinase); Mindrinos, et al., (1994) Cell 78:1089 (Arabidopsis RSP2 gene for resistance to Pseudomonas syringae), McDowell and Woffenden, (2003) Trends Biotechnol. 21(4):178-83 and Toyoda, et al., (2002) Transgenic Res. 11(6):567-82. A plant resistant to a disease is one that is more resistant to a pathogen as compared to the wild type plant.

[0292] (B) Genes encoding a Bacillus thuringiensis protein, a derivative thereof or a synthetic polypeptide modeled thereon. See, for example, Geiser, et al., (1986) Gene 48:109, who disclose the cloning and nucleotide sequence of a Bt delta-endotoxin gene. Moreover, DNA molecules encoding delta-endotoxin genes can be purchased from American Type Culture Collection (Rockville, Md.), for example, under ATCC® Accession Numbers 40098, 67136, 31995 and 31998. Other non-limiting examples of Bacillus thuringiensis transgenes being genetically engineered are given in the following patents and patent applications and hereby are incorporated by reference for this purpose: U.S. Pat. Nos. 5,188,960; 5,689,052; 5,880,275; 5,986,177; 6,023,013, 6,060,594, 6,063,597, 6,077,824, 6,620,988, 6,642,030, 6,713,259, 6,893,826, 7,105,332; 7,179,965, 7,208,474; 7,227,056, 7,288,643, 7,323,556, 7,329,736, 7,449,552, 7,468,278, 7,510,878, 7,521,235, 7,544,862, 7,605,304, 7,696,412, 7,629,504, 7,705,216, 7,772,465, 7,790,846, 7,858,849 and WO 1991/14778; WO 1999/31248; WO 2001/12731; WO 1999/24581 and WO 1997/40162.

[0293] Genes encoding pesticidal proteins may also be stacked including but are not limited to: insecticidal proteins from Pseudomonas sp. such as PSEEN3174 (Monalysin, (2011) PLoS Pathogens, 7:1-13), from Pseudomonas protegens strain CHAO and Pf-5 (previously fluorescens) (Pechy-Tarr, (2008) Environmental Microbiology 10:2368-2386: GenBank Accession No. EU400157); from Pseudomonas Taiwanensis (Liu, et al., (2010) J. Agric. Food Chem. 58:12343-12349) and from Pseudomonas pseudoalcligenes (Zhang, et al., (2009) Annals of Microbiology 59:45-50 and Li, et al., (2007) Plant Cell Tiss. Organ Cult. 89:159-168); insecticidal proteins from Photorhabdus sp. and Xenorhabdus sp. (Hinchliffe, et al., (2010) The Open Toxinology Journal 3:101-118 and Morgan, et al., (2001) Applied and Envir. Micro. 67:2062-2069), U.S. Pat. Nos. 6,048,838, and 6,379,946; a PIP-1 polypeptide of US Patent Publication US20140007292; an AflP-1A and/or AflP-1B polypeptide of US Patent Publication US20140033361; a PHI-4 polypeptide of US patent Publication US20140274885 or PCT Patent Publication WO2014/150914; a PIP-47 polypeptide of PCT Serial Number PCT/US14/51063, a PIP-72 polypeptide of PCT Serial Number PCT/US14/55128, and δ-endotoxins including, but not limited to, the Cry1, Cry2, Cry3, Cry4, Cry5, Cry6, Cry7, Cry8, Cry9, Cry10, Cry11, Cry12, Cry13, Cry14, Cry15, Cry16, Cry17, Cry18, Cry19, Cry20, Cry21, Cry22, Cry23, Cry24, Cry25, Cry26, Cry27, Cry 28, Cry 29, Cry 30, Cry31, Cry32, Cry33, Cry34, Cry35,Cry36, Cry37, Cry38, Cry39, Cry40, Cry41, Cry42, Cry43, Cry44, Cry45, Cry 46, Cry47, Cry49, Cry50, Cry51, Cry52, Cry53, Cry 54, Cry55, Cry56, Cry57, Cry58, Cry59, Cry60, Cry61, Cry62, Cry63, Cry64, Cry65, Cry66, Cry67, Cry68, Cry69, Cry70, Cry71, and Cry 72 classes of δ-endotoxin genes and the B. thuringiensis cytolytic Cyt1 and Cyt2 genes. Members of these classes of B. thuringiensis insecticidal proteins include, but are not limited to Cry1Aa1 (Accession #AAA22353); Cry1Aa2 (Accession #Accession #AAA22552); Cry1Aa3 (Accession #BAA00257); Cry1Aa4 (Accession #CAA31886); Cry1Aa5 (Accession #BAA04468); Cry1Aa6 (Accession #AAA86265); Cry1Aa7 (Accession #AAD46139); Cry1Aa8 (Accession #126149); Cry1Aa9 (Accession #BAA77213); Cry1Aa10 (Accession #AAD55382); Cry1Aa11 (Accession #CAA70856); Cry1Aa12 (Accession #AAP80146); Cry1Aa13 (Accession #AAM44305); Cry1Aa14 (Accession #AAP40639); Cry1Aa15 (Accession #AAY66993); Cry1Aa16 (Accession #HQ439776); Cry1Aa17 (Accession #HQ439788); Cry1Aa18 (Accession #HQ439790); Cry1Aa19 (Accession #HQ685121); Cry1Aa20 (Accession #JF340156); Cry1Aa21 (Accession #JN651496); Cry1Aa22 (Accession #KC158223); Cry1Ab1 (Accession #AAA22330); Cry1Ab2 (Accession #AAA22613); Cry1Ab3 (Accession #AAA22561); Cry1Ab4 (Accession #BAA00071); Cry1Ab5 (Accession #CAA28405); Cry1Ab6 (Accession #AAA22420); Cry1Ab7 (Accession #CAA31620); Cry1Ab8 (Accession #AAA22551); Cry1Ab9 (Accession #CAA38701); Cry1Ab10 (Accession #A29125); Cry1Ab11 (Accession #112419); Cry1Ab12 (Accession #AAC64003); Cry1Ab13 (Accession #AAN76494); Cry1Ab14 (Accession #AAG16877); Cry1Ab15 (Accession #AA013302); Cry1Ab16 (Accession #AAK55546); Cry1Ab17 (Accession #AAT46415); Cry1Ab18 (Accession #AAQ88259); Cry1Ab19 (Accession #AAW31761); Cry1Ab20 (Accession #ABB72460); Cry1Ab21 (Accession #ABS18384); Cry1Ab22 (Accession #ABW87320); Cry1Ab23 (Accession #HQ439777); Cry1Ab24 (Accession #HQ439778); Cry1Ab25 (Accession #HQ685122); Cry1Ab26 (Accession #HQ847729); Cry1Ab27 (Accession #JN135249); Cry1Ab28 (Accession #JN135250); Cry1Ab29 (Accession #JN135251); Cry1Ab30 (Accession #JN135252); Cry1Ab31 (Accession #JN135253); Cry1Ab32 (Accession #JN135254); Cry1Ab33 (Accession #AAS93798); Cry1Ab34 (Accession #KC156668); Cry1Ab-like (Accession #AAK14336); Cry1Ab-like (Accession #AAK14337); Cry1Ab-like (Accession #AAK14338); Cry1Ab-like (Accession #ABG88858); Cry1Ac1 (Accession #AAA22331); Cry1Ac2 (Accession #AAA22338); Cry1Ac3 (Accession #CAA38098); Cry1Ac4 (Accession #AAA73077); Cry1Ac5 (Accession #AAA22339); Cry1Ac6 (Accession #AAA86266); Cry1Ac7 (Accession #AAB46989); Cry1Ac8 (Accession #AAC44841); Cry1Ac9 (Accession #AAB49768); Cry1Ac10 (Accession #CAA05505); Cry1Ac11 (Accession #CAA10270); Cry1Ac12 (Accession #112418); Cry1Ac13 (Accession #AAD38701); Cry1Ac14 (Accession #AAQ06607); Cry1Ac15 (Accession #AAN07788); Cry1Ac16 (Accession #AAU87037); Cry1Ac17 (Accession #AAX18704); Cry1Ac18 (Accession #AAY88347); Cry1Ac19 (Accession #ABD37053); Cry1Ac20 (Accession #ABB89046); Cry1Ac21 (Accession #AAY66992); Cry1Ac22 (Accession #ABZ01836); Cry1Ac23 (Accession #CAQ30431); Cry1Ac24 (Accession #ABL01535); Cry1Ac25 (Accession #FJ513324); Cry1Ac26 (Accession #FJ617446); Cry1Ac27 (Accession #FJ617447); Cry1Ac28 (Accession #ACM90319); Cry1Ac29 (Accession #DQ438941); Cry1Ac30 (Accession #GQ227507); Cry1Ac31 (Accession #GU446674); Cry1Ac32 (Accession #HM061081); Cry1Ac33 (Accession #GQ866913); Cry1Ac34 (Accession #HQ230364); Cry1Ac35 (Accession #JF340157); Cry1Ac36 (Accession #JN387137); Cry1Ac37 (Accession #JQ317685); Cry1Ad1 (Accession #AAA22340); Cry1Ad2 (Accession #CAA01880); Cry1Ae1 (Accession #AAA22410); Cry1Af1 (Accession #AAB82749); Cry1Ag1 (Accession #AAD46137); Cry1Ah1 (Accession #AAQ14326); Cry1Ah2 (Accession #ABB76664); Cry1Ah3 (Accession #HQ439779); Cry1Ai1 (Accession #AA039719); Cry1Ai2 (Accession #HQ439780); Cry1A-like (Accession #AAK14339); Cry1Ba1 (Accession #CAA29898); Cry1Ba2 (Accession #CAA65003); Cry1Ba3 (Accession #AAK63251); Cry1Ba4 (Accession #AAK51084); Cry1Ba5 (Accession #AB020894); Cry1Ba6 (Accession #ABL60921); Cry1Ba7 (Accession #HQ439781); Cry1Bb1 (Accession #AAA22344); Cry1Bb2 (Accession #HQ439782); Cry1Bc1 (Accession #CAA86568); Cry1Bd1 (Accession #AAD10292); Cry1Bd2 (Accession #AAM93496); Cry1Be1 (Accession #AAC32850); Cry1Be2 (Accession #AAQ52387); Cry1Be3 (Accession #ACV96720); Cry1Be4 (Accession #HM070026); Cry1Bf1 (Accession #CAC50778); Cry1Bf2 (Accession #AAQ52380); Cry1Bg1 (Accession #AA039720); Cry1Bh1 (Accession #HQ589331); Cry1Bi1 (Accession #KC156700); Cry1Cal (Accession #CAA30396); Cry1Ca2 (Accession #CAA31951); Cry1Ca3 (Accession #AAA22343); Cry1Ca4 (Accession #CAA01886); Cry1Ca5 (Accession #CAA65457); Cry1Ca6 [1](Accession #AAF37224); Cry1Ca7 (Accession #AAG50438); Cry1Ca8 (Accession #AAM00264); Cry1Ca9 (Accession #AAL79362); Cry1Ca10 (Accession #AAN16462); Cry1Ca11 (Accession #AAX53094); Cry1Ca12 (Accession #HM070027); Cry1Ca13 (Accession #HQ412621); Cry1Ca14 (Accession #JN651493); Cry1Cb1 (Accession #M97880); Cry1Cb2 (Accession #AAG35409); Cry1Cb3 (Accession #ACD50894); Cry1Cb-like (Accession #AAX63901); Cry1Da1 (Accession #CAA38099); Cry1Da2 (Accession #176415); Cry1Da3 (Accession #HQ439784); Cry1Db1 (Accession #CAA80234); Cry1 Db2 (Accession #AAK48937); Cry1Dc1 (Accession #ABK35074); Cry1Ea1 (Accession #CAA37933); Cry1Ea2 (Accession #CAA39609); Cry1Ea3 (Accession #AAA22345); Cry1Ea4 (Accession #AAD04732); Cry1Ea5 (Accession #A15535); Cry1Ea6 (Accession #AAL50330); Cry1Ea7 (Accession #AAW72936); Cry1Ea8 (Accession #ABX11258); Cry1Ea9 (Accession #HQ439785); Cry1Ea10 (Accession #ADR00398); Cry1Ea11 (Accession #JQ652456); Cry1Eb1 (Accession #AAA22346); Cry1Fa1 (Accession #AAA22348); Cry1Fa2 (Accession #AAA22347); Cry1Fa3 (Accession #HM070028); Cry1Fa4 (Accession #HM439638); Cry1Fb1 (Accession #CAA80235); Cry1Fb2 (Accession #BAA25298); Cry1Fb3 (Accession #AAF21767); Cry1Fb4 (Accession #AAC10641); Cry1Fb5 (Accession #AA013295); Cry1Fb6 (Accession #ACD50892); Cry1Fb7 (Accession #ACD50893); Cry1Ga1 (Accession #CAA80233); Cry1Ga2 (Accession #CAA70506); Cry1Gb1 (Accession #AAD10291); Cry1Gb2 (Accession #AA013756); Cry1Gc1 (Accession #AAQ52381); Cry1Ha1 (Accession #CAA80236); Cry1Hb1 (Accession #AAA79694); Cry1Hb2 (Accession #HQ439786); Cry1H-like (Accession #AAF01213); Cry1Ia1 (Accession #CAA44633); Cry1Ia2 (Accession #AAA22354); Cry1Ia3 (Accession #AAC36999); Cry1Ia4 (Accession #AAB00958); Cry1Ia5 (Accession #CAA70124); Cry1Ia6 (Accession #AAC26910); Cry1Ia7 (Accession #AAM73516); Cry1Ia8 (Accession #AAK66742); Cry1Ia9 (Accession #AAQ08616); Cry1Ia10 (Accession #AAP86782); Cry1Ia11 (Accession #CAC85964); Cry1Ia12 (Accession #AAV53390); Cry1Ia13 (Accession #ABF83202); Cry1Ia14 (Accession #ACG63871); Cry1Ia15 (Accession #FJ617445); Cry1Ia16 (Accession #FJ617448); Cry1Ia17 (Accession #GU989199); Cry1Ia18 (Accession #ADK23801); Cry1Ia19 (Accession #HQ439787); Cry1Ia20 (Accession #JQ228426); Cry1Ia21 (Accession #JQ228424); Cry1Ia22 (Accession #JQ228427); Cry1Ia23 (Accession #JQ228428); Cry1Ia24 (Accession #JQ228429); Cry1Ia25 (Accession #JQ228430); Cry1Ia26 (Accession #JQ228431); Cry1Ia27 (Accession #JQ228432); Cry1Ia28 (Accession #JQ228433); Cry1Ia29 (Accession #JQ228434); Cry1Ia30 (Accession #JQ317686); Cry1Ia31 (Accession #JX944038); Cry1Ia32 (Accession #JX944039); Cry1Ia33 (Accession #JX944040); Cry1Ib1 (Accession #AAA82114); Cry1Ib2 (Accession #ABW88019); Cry1Ib3 (Accession #ACD75515); Cry1Ib4 (Accession #HM051227); Cry1Ib5 (Accession #HM070028); Cry1Ib6 (Accession #ADK38579); Cry1Ib7 (Accession #JN571740); Cry1Ib8 (Accession #JN675714); Cry1Ib9 (Accession #JN675715); Cry1Ib10 (Accession #JN675716); Cry1Ib11 (Accession #JQ228423); Cry1Ic1 (Accession #AAC62933); Cry1Ic2 (Accession #AAE71691); Cry1Id1 (Accession #AAD44366); Cry1Id2 (Accession #JQ228422); Cry1Ie1 (Accession #AAG43526); Cry1Ie2 (Accession #HM439636); Cry1Ie3 (Accession #KC156647); Cry1Ie4 (Accession #KC156681); Cry1If1 (Accession #AAQ52382); Cry1Ig1 (Accession #KC156701); Cry1I-like (Accession #AAC31094); Cry1I-like (Accession #ABG88859); Cry1Ja1 (Accession #AAA22341); Cry1Ja2 (Accession #HM070030); Cry1Ja3 (Accession #JQ228425); Cry1Jb1 (Accession #AAA98959); Cry1Jc1 (Accession #AAC31092); Cry1Jc2 (Accession #AAQ52372); Cry1Jd1 (Accession #CAC50779); Cry1Ka1 (Accession #AAB00376); Cry1Ka2 (Accession #HQ439783); Cry1La1 (Accession #AAS60191); Cry1 La2 (Accession #HM070031); Cry1Ma1 (Accession #FJ884067); Cry1Ma2 (Accession #KC156659); Cry1Na1 (Accession #KC156648); Cry1Nb1 (Accession #KC156678); Cry1-like (Accession #AAC31091); Cry2Aa1 (Accession #AAA22335); Cry2Aa2 (Accession #AAA83516); Cry2Aa3 (Accession #D86064); Cry2Aa4 (Accession #AAC04867); Cry2Aa5 (Accession #CAA10671); Cry2Aa6 (Accession #CAA10672); Cry2Aa7 (Accession #CAA10670); Cry2Aa8 (Accession #AA013734); Cry2Aa9 (Accession #AA013750); Cry2Aa10 (Accession #AAQ04263); Cry2Aa11 (Accession #AAQ52384); Cry2Aa12 (Accession #AB183671); Cry2Aa13 (Accession #ABL01536); Cry2Aa14 (Accession #ACF04939); Cry2Aa15 (Accession #JN426947); Cry2Ab1 (Accession #AAA22342); Cry2Ab2 (Accession #CAA39075); Cry2Ab3 (Accession #AAG36762); Cry2Ab4 (Accession #AA013296); Cry2Ab5 (Accession #AAQ04609); Cry2Ab6 (Accession #AAP59457); Cry2Ab7 (Accession #AAZ66347); Cry2Ab8 (Accession #ABC95996); Cry2Ab9 (Accession #ABC74968); Cry2Ab10 (Accession #EF157306); Cry2Ab11 (Accession #CAM84575); Cry2Ab12 (Accession #ABM21764); Cry2Ab13 (Accession #ACG76120); Cry2Ab14 (Accession #ACG76121); Cry2Ab15 (Accession #HM037126); Cry2Ab16 (Accession #GQ866914); Cry2Ab17 (Accession #HQ439789); Cry2Ab18 (Accession #JN135255); Cry2Ab19 (Accession #JN135256); Cry2Ab20 (Accession #JN135257); Cry2Ab21 (Accession #JN135258); Cry2Ab22 (Accession #JN135259); Cry2Ab23 (Accession #JN135260); Cry2Ab24 (Accession #JN135261); Cry2Ab25 (Accession #JN415485); Cry2Ab26 (Accession #JN426946); Cry2Ab27 (Accession #JN415764); Cry2Ab28 (Accession #JN651494); Cry2Ac1 (Accession #CAA40536); Cry2Ac2 (Accession #AAG35410); Cry2Ac3 (Accession #AAQ52385); Cry2Ac4 (Accession #ABC95997); Cry2Ac5 (Accession #ABC74969); Cry2Ac6 (Accession #ABC74793); Cry2Ac7 (Accession #CAL18690); Cry2Ac8 (Accession #CAM09325); Cry2Ac9 (Accession #CAM09326); Cry2Ac10 (Accession #ABN15104); Cry2Ac11 (Accession #CAM83895); Cry2Ac12 (Accession #CAM83896); Cry2Ad1 (Accession #AAF09583); Cry2Ad2 (Accession #ABC86927); Cry2Ad3 (Accession #CAK29504); Cry2Ad4 (Accession #CAM32331); Cry2Ad5 (Accession #CA078739); Cry2Ae1 (Accession #AAQ52362); Cry2Af1 (Accession #AB030519); Cry2Af2 (Accession #GQ866915); Cry2Ag1 (Accession #ACH91610); Cry2Ah1 (Accession #EU939453); Cry2Ah2 (Accession #ACL80665); Cry2Ah3 (Accession #GU073380); Cry2Ah4 (Accession #KC156702); Cry2Ai1 (Accession #FJ788388); Cry2Aj (Accession #); Cry2Ak1 (Accession #KC156660); Cry2Ba1 (Accession #KC156658); Cry3Aa1 (Accession #AAA22336); Cry3Aa2 (Accession #AAA22541); Cry3Aa3 (Accession #CAA68482); Cry3Aa4 (Accession #AAA22542); Cry3Aa5 (Accession #AAA50255); Cry3Aa6 (Accession #AAC43266); Cry3Aa7 (Accession #CAB41411); Cry3Aa8 (Accession #AAS79487); Cry3Aa9 (Accession #AAW05659); Cry3Aa10 (Accession #AAU29411); Cry3Aa11 (Accession #AAW82872); Cry3Aa12 (Accession #ABY49136); Cry3Ba1 (Accession #CAA34983); Cry3Ba2 (Accession #CAA00645); Cry3Ba3 (Accession #JQ397327); Cry3Bb1 (Accession #AAA22334); Cry3Bb2 (Accession #AAA74198); Cry3Bb3 (Accession #115475); Cry3Ca1 (Accession #CAA42469); Cry4Aa1 (Accession #CAA68485); Cry4Aa2 (Accession #BAA00179); Cry4Aa3 (Accession #CAD30148); Cry4Aa4 (Accession #AFB18317); Cry4A-like (Accession #AAY96321); Cry4Ba1 (Accession #CAA30312); Cry4Ba2 (Accession #CAA30114); Cry4Ba3 (Accession #AAA22337); Cry4Ba4 (Accession #BAA00178); Cry4Ba5 (Accession #CAD30095); Cry4Ba-like (Accession #ABC47686); Cry4Ca1 (Accession #EU646202); Cry4Cb1 (Accession #FJ403208); Cry4Cb2 (Accession #FJ597622); Cry4Cc1 (Accession #FJ403207); Cry5Aa1 (Accession #AAA67694); Cry5Ab1 (Accession #AAA67693); Cry5Ac1 (Accession #134543); Cry5Ad1 (Accession #ABQ82087); Cry5Ba1 (Accession #AAA68598); Cry5Ba2 (Accession #ABW88931); Cry5Ba3 (Accession #AFJ04417); Cry5Ca1 (Accession #HM461869); Cry5Ca2 (Accession #ZP_04123426); Cry5Da1 (Accession #HM461870); Cry5Da2 (Accession #ZP_04123980); Cry5Ea1 (Accession #HM485580); Cry5Ea2 (Accession #ZP_04124038); Cry6Aa1 (Accession #AAA22357); Cry6Aa2 (Accession #AAM46849); Cry6Aa3 (Accession #ABH03377); Cry6Ba1 (Accession #AAA22358); Cry7Aa1 (Accession #AAA22351); Cry7Ab1 (Accession #AAA21120); Cry7Ab2 (Accession #AAA21121); Cry7Ab3 (Accession #ABX24522); Cry7Ab4 (Accession #EU380678); Cry7Ab5 (Accession #ABX79555); Cry7Ab6 (Accession #AC144005); Cry7Ab7 (Accession #ADB89216); Cry7Ab8 (Accession #GU145299); Cry7Ab9 (Accession #ADD92572); Cry7Ba1 (Accession #ABB70817); Cry7Bb1 (Accession #KC156653); Cry7Ca1 (Accession #ABR67863); Cry7Cb1 (Accession #KC156698); Cry7Da1 (Accession #ACQ99547); Cry7Da2 (Accession #HM572236); Cry7Da3 (Accession #KC156679); Cry7Ea1 (Accession #HM035086); Cry7Ea2 (Accession #HM132124); Cry7Ea3 (Accession #EEM19403); Cry7Fa1 (Accession #HM035088); Cry7Fa2 (Accession #EEM19090); Cry7Fb1 (Accession #HM572235); Cry7Fb2 (Accession #KC156682); Cry7Ga1 (Accession #HM572237); Cry7Ga2 (Accession #KC156669); Cry7Gb1 (Accession #KC156650); Cry7Gc1 (Accession #KC156654); Cry7Gd1 (Accession #KC156697); Cry7Ha1 (Accession #KC156651); Cry7Ia1 (Accession #KC156665); Cry7Ja1 (Accession #KC156671); Cry7Ka1 (Accession #KC156680); Cry7Kb1 (Accession #BAM99306); Cry7La1 (Accession #BAM99307); Cry8Aa1 (Accession #AAA21117); Cry8Ab1 (Accession #EU044830); Cry8Ac1 (Accession #KC156662); Cry8Ad1 (Accession #KC156684); Cry8Ba1 (Accession #AAA21118); Cry8Bb1 (Accession #CAD57542); Cry8Bc1 (Accession #CAD57543); Cry8Ca1 (Accession #AAA21119); Cry8Ca2 (Accession #AAR98783); Cry8Ca3 (Accession #EU625349); Cry8Ca4 (Accession #ADB54826); Cry8Da1 (Accession #BAC07226); Cry8Da2 (Accession #BD133574); Cry8Da3 (Accession #BD133575); Cry8Db1 (Accession #BAF93483); Cry8Ea1 (Accession #AAQ73470); Cry8Ea2 (Accession #EU047597); Cry8Ea3 (Accession #KC855216); Cry8Fa1 (Accession #AAT48690); Cry8Fa2 (Accession #HQ174208); Cry8Fa3 (Accession #AFH78109); Cry8Ga1 (Accession #AAT46073); Cry8Ga2 (Accession #ABC42043); Cry8Ga3 (Accession #FJ198072); Cry8Ha1 (Accession #AAW81032); Cry8Ia1 (Accession #EU381044); Cry8Ia2 (Accession #GU073381); Cry8Ia3 (Accession #HM044664); Cry8Ia4 (Accession #KC156674); Cry8Ib1 (Accession #GU325772); Cry8Ib2 (Accession #KC156677); Cry8Ja1 (Accession #EU625348); Cry8Ka1 (Accession #FJ422558); Cry8Ka2 (Accession #ACN87262); Cry8Kb1 (Accession #HM123758); Cry8Kb2 (Accession #KC156675); Cry8La1 (Accession #GU325771); Cry8Ma1 (Accession #HM044665); Cry8Ma2 (Accession #EEM86551); Cry8Ma3 (Accession #HM210574); Cry8Na1 (Accession #HM640939); Cry8Pa1 (Accession #HQ388415); Cry8Qa1 (Accession #HQ441166); Cry8Qa2 (Accession #KC152468); Cry8Ra1 (Accession #AFP87548); Cry8Sa1 (Accession #JQ740599); Cry8Ta1 (Accession #KC156673); Cry8-like (Accession #FJ770571); Cry8-like (Accession #ABS53003); Cry9Aa1 (Accession #CAA41122); Cry9Aa2 (Accession #CAA41425); Cry9Aa3 (Accession #GQ249293); Cry9Aa4 (Accession #GQ249294); Cry9Aa5 (Accession #JX174110); Cry9Aa like (Accession #AAQ52376); Cry9Ba1 (Accession #CAA52927); Cry9Ba2 (Accession #GU299522); Cry9Bb1 (Accession #AAV28716); Cry9Ca1 (Accession #CAA85764); Cry9Ca2 (Accession #AAQ52375); Cry9Da1 (Accession #BAA19948); Cry9Da2 (Accession #AAB97923); Cry9Da3 (Accession #GQ249293); Cry9Da4 (Accession #GQ249297); Cry9Db1 (Accession #AAX78439); Cry9Dc1 (Accession #KC156683); Cry9Ea1 (Accession #BAA34908); Cry9Ea2 (Accession #AA012908); Cry9Ea3 (Accession #ABM21765); Cry9Ea4 (Accession #ACE88267); Cry9Ea5 (Accession #ACF04743); Cry9Ea6 (Accession #ACG63872); Cry9Ea7 (Accession #FJ380927); Cry9Ea8 (Accession #GQ249292); Cry9Ea9 (Accession #JN651495); Cry9Eb1 (Accession #CAC50780); Cry9Eb2 (Accession #GQ249298); Cry9Eb3 (Accession #KC156646); Cry9Ec1 (Accession #AAC63366); Cry9Ed1 (Accession #AAX78440); Cry9Ee1 (Accession #GQ249296); Cry9Ee2 (Accession #KC156664); Cry9Fa1 (Accession #KC156692); Cry9Ga1 (Accession #KC156699); Cry9-like (Accession #AAC63366); Cry10Aa1 (Accession #AAA22614); Cry10Aa2 (Accession #E00614); Cry10Aa3 (Accession #CAD30098); Cry10Aa4 (Accession #AFB18318); Cry10A-like (Accession #DQ167578); Cry11 Aa1 (Accession #AAA22352); Cry11 Aa2 (Accession #AAA22611); Cry11Aa3 (Accession #CAD30081); Cry11Aa4 (Accession #AFB18319); Cry11Aa-like (Accession #DQ166531); Cry11Ba1 (Accession #CAA60504); Cry11Bb1 (Accession #AAC97162); Cry11Bb2 (Accession #HM068615); Cry12Aa1 (Accession #AAA22355); Cry13Aa1 (Accession #AAA22356); Cry14Aa1 (Accession #AAA21516); Cry14Ab1 (Accession #KC156652); Cry15Aa1 (Accession #AAA22333); Cry16Aa1 (Accession #CAA63860); Cry17Aa1 (Accession #CAA67841); Cry18Aa1 (Accession #CAA67506); Cry18Ba1 (Accession #AAF89667); Cry18Ca1 (Accession #AAF89668); Cry19Aa1 (Accession #CAA68875); Cry19Ba1 (Accession #BAA32397); Cry19Ca1 (Accession #AFM37572); Cry20Aa1 (Accession #AAB93476); Cry20Ba1 (Accession #ACS93601); Cry20Ba2 (Accession #KC156694); Cry20-like (Accession #GQ144333); Cry21Aa1 (Accession #132932); Cry21Aa2 (Accession #166477); Cry21Ba1 (Accession #BAC06484); Cry21Ca1 (Accession #JF521577); Cry21Ca2 (Accession #KC156687); Cry21Da1 (Accession #JF521578); Cry22Aa1 (Accession #134547); Cry22Aa2 (Accession #CAD43579); Cry22Aa3 (Accession #ACD93211); Cry22Ab1 (Accession #AAK50456); Cry22Ab2 (Accession #CAD43577); Cry22Ba1 (Accession #CAD43578); Cry22Bb1 (Accession #KC156672); Cry23Aa1 (Accession #AAF76375); Cry24Aa1 (Accession #AAC61891); Cry24Ba1 (Accession #BAD32657); Cry24Ca1 (Accession #CAJ43600); Cry25Aa1 (Accession #AAC61892); Cry26Aa1 (Accession #AAD25075); Cry27Aa1 (Accession #BAA82796); Cry28Aa1 (Accession #AAD24189); Cry28Aa2 (Accession #AAG00235); Cry29Aa1 (Accession #CAC80985); Cry30Aa1 (Accession #CAC80986); Cry30Ba1 (Accession #BAD00052); Cry30Ca1 (Accession #BAD67157); Cry30Ca2 (Accession #ACU24781); Cry30Da1 (Accession #EF095955); Cry30Db1 (Accession #BAE80088); Cry30Ea1 (Accession #ACC95445); Cry30Ea2 (Accession #FJ499389); Cry30Fa1 (Accession #AC122625); Cry30Ga1 (Accession #ACG60020); Cry30Ga2 (Accession #HQ638217); Cry31Aa1 (Accession #BAB11757); Cry31Aa2 (Accession #AAL87458); Cry31Aa3 (Accession #BAE79808); Cry31Aa4 (Accession #BAF32571); Cry31Aa5 (Accession #BAF32572); Cry31Aa6 (Accession #BA144026); Cry31Ab1 (Accession #BAE79809); Cry31Ab2 (Accession #BAF32570); Cry31Ac1 (Accession #BAF34368); Cry31Ac2 (Accession #AB731600); Cry31Ad1 (Accession #BA144022); Cry32Aa1 (Accession #AAG36711); Cry32Aa2 (Accession #GU063849); Cry32Ab1 (Accession #GU063850); Cry32Ba1 (Accession #BAB78601); Cry32Ca1 (Accession #BAB78602); Cry32Cb1 (Accession #KC156708); Cry32Da1 (Accession #BAB78603); Cry32Ea1 (Accession #GU324274); Cry32Ea2 (Accession #KC156686); Cry32Eb1 (Accession #KC156663); Cry32Fa1 (Accession #KC156656); Cry32Ga1 (Accession #KC156657); Cry32Ha1 (Accession #KC156661); Cry32Hb1 (Accession #KC156666); Cry321a1 (Accession #KC156667); Cry32Ja1 (Accession #KC156685); Cry32Ka1 (Accession #KC156688); Cry32La1 (Accession #KC156689); Cry32Ma1 (Accession #KC156690); Cry32Mb1 (Accession #KC156704); Cry32Na1 (Accession #KC156691); Cry320a1 (Accession #KC156703); Cry32Pa1 (Accession #KC156705); Cry32Qa1 (Accession #KC156706); Cry32Ra1 (Accession #KC156707); Cry32Sa1 (Accession #KC156709); Cry32Ta1 (Accession #KC156710); Cry32Ua1 (Accession #KC156655); Cry33Aa1 (Accession #AAL26871); Cry34Aa1 (Accession #AAG50341); Cry34Aa2 (Accession #AAK64560); Cry34Aa3 (Accession #AAT29032); Cry34Aa4 (Accession #AAT29030); Cry34Ab1 (Accession #AAG41671); Cry34Ac1 (Accession #AAG50118); Cry34Ac2 (Accession #AAK64562); Cry34Ac3 (Accession #AAT29029); Cry34Ba1 (Accession #AAK64565); Cry34Ba2 (Accession #AAT29033); Cry34Ba3 (Accession #AAT29031); Cry35Aa1 (Accession #AAG50342); Cry35Aa2 (Accession #AAK64561); Cry35Aa3 (Accession #AAT29028); Cry35Aa4 (Accession #AAT29025); Cry35Ab1 (Accession #AAG41672); Cry35Ab2 (Accession #AAK64563); Cry35Ab3 (Accession #AY536891); Cry35Ac1 (Accession #AAG50117); Cry35Ba1 (Accession #AAK64566); Cry35Ba2 (Accession #AAT29027); Cry35Ba3 (Accession #AAT29026); Cry36Aa1 (Accession #AAK64558); Cry37Aa1 (Accession #AAF76376); Cry38Aa1 (Accession #AAK64559); Cry39Aa1 (Accession #BAB72016); Cry40Aa1 (Accession #BAB72018); Cry40Ba1 (Accession #BAC77648); Cry40Ca1 (Accession #EU381045); Cry40Da1 (Accession #ACF15199); Cry41Aa1 (Accession #BAD35157); Cry41Ab1 (Accession #BAD35163); Cry41Ba1 (Accession #HM461871); Cry41Ba2 (Accession #ZP_04099652); Cry42Aa1 (Accession #BAD35166); Cry43Aa1 (Accession #BAD15301); Cry43Aa2 (Accession #BAD95474); Cry43Ba1 (Accession #BAD15303); Cry43Ca1 (Accession #KC156676); Cry43Cb1 (Accession #KC156695); Cry43Cc1 (Accession #KC156696); Cry43-like (Accession #BAD15305); Cry44Aa (Accession #BAD08532); Cry45Aa (Accession #BAD22577); Cry46Aa (Accession #BAC79010); Cry46Aa2 (Accession #BAG68906); Cry46Ab (Accession #BAD35170); Cry47Aa (Accession #AAY24695); Cry48Aa (Accession #CAJ18351); Cry48Aa2 (Accession #CAJ86545); Cry48Aa3 (Accession #CAJ86546); Cry48Ab (Accession #CAJ86548); Cry48Ab2 (Accession #CAJ86549); Cry49Aa (Accession #CAH56541); Cry49Aa2 (Accession #CAJ86541); Cry49Aa3 (Accession #CAJ86543); Cry49Aa4 (Accession #CAJ86544); Cry49Ab1 (Accession #CAJ86542); Cry50Aa1 (Accession #BAE86999); Cry50Ba1 (Accession #GU446675); Cry50Ba2 (Accession #GU446676); Cry51Aa1 (Accession #AB114444); Cry51Aa2 (Accession #GU570697); Cry52Aa1 (Accession #EF613489); Cry52Ba1 (Accession #FJ361760); Cry53Aa1 (Accession #EF633476); Cry53Ab1 (Accession #FJ361759); Cry54Aa1 (Accession #ACA52194); Cry54Aa2 (Accession #GQ140349); Cry54Ba1 (Accession #GU446677); Cry55Aa1 (Accession #ABW88932); Cry54Ab1 (Accession #JQ916908); Cry55Aa2 (Accession #AAE33526); Cry56Aa1 (Accession #ACU57499); Cry56Aa2 (Accession #GQ483512); Cry56Aa3 (Accession #JX025567); Cry57Aa1 (Accession #ANC87261); Cry58Aa1 (Accession #ANC87260); Cry59Ba1 (Accession #JN790647); Cry59Aa1 (Accession #ACR43758); Cry60Aa1 (Accession #ACU24782); Cry60Aa2 (Accession #EA057254); Cry60Aa3 (Accession #EEM99278); Cry60Bal (Accession #GU810818); Cry60Ba2 (Accession #EA057253); Cry60Ba3 (Accession #EEM99279); Cry61Aa1 (Accession #HM035087); Cry61Aa2 (Accession #HM132125); Cry61Aa3 (Accession #EEM19308); Cry62Aa1 (Accession #HM054509); Cry63Aa1 (Accession #BA144028); Cry64Aa1 (Accession #BAJ05397); Cry65Aa1 (Accession #HM461868); Cry65Aa2 (Accession #ZP_04123838); Cry66Aa1 (Accession #HM485581); Cry66Aa2 (Accession #ZP_04099945); Cry67Aa1 (Accession #HM485582); Cry67Aa2 (Accession #ZP_04148882); Cry68Aa1 (Accession #HQ113114); Cry69Aa1 (Accession #HQ401006); Cry69Aa2 (Accession #JQ821388); Cry69Ab1 (Accession #JN209957); Cry70Aa1 (Accession #JN646781); Cry70Ba1 (Accession #ADO51070); Cry70Bb1 (Accession #EEL67276); Cry71Aa1 (Accession #JX025568); Cry72Aa1 (Accession #JX025569).

[0294] Examples of δ-endotoxins also include but are not limited to Cry1A proteins of U.S. Pat. Nos. 5,880,275 and 7,858,849; a DIG-3 or DIG-11 toxin (N-terminal deletion of a-helix 1 and/or a-helix 2 variants of Cry proteins such as Cry1A) of U.S. Pat. Nos. 8,304,604 and 8,304,605, Cry1B of U.S. patent application Ser. No. 10/525,318; Cry1C of U.S. Pat. No. 6,033,874; Cry1F of U.S. Pat. Nos. 5,188,960, 6,218,188; Cry1A/F chimeras of U.S. Pat. Nos. 7,070,982; 6,962,705 and 6,713,063); a Cry2 protein such as Cry2Ab protein of U.S. Pat. No. 7,064,249); a Cry3A protein including but not limited to an engineered hybrid insecticidal protein (eHIP) created by fusing unique combinations of variable regions and conserved blocks of at least two different Cry proteins (US Patent Application Publication Number 2010/0017914); a Cry4 protein; a Cry5 protein; a Cry6 protein; Cry8 proteins of U.S. Pat. Nos. 7,329,736, 7,449,552, 7,803,943, 7,476,781, 7,105,332, 7,378,499 and 7,462,760; a Cry9 protein such as such as members of the Cry9A, Cry9B, Cry9C, Cry9D, Cry9E, and Cry9F families; a Cry15 protein of Naimov, et al., (2008) Applied and Environmental Microbiology 74:7145-7151; a Cry22, a Cry34Ab1 protein of U.S. Pat. Nos. 6,127,180, 6,624,145 and 6,340,593; a CryET33 and CryET34 protein of U.S. Pat. Nos. 6,248,535, 6,326,351, 6,399,330, 6,949,626, 7,385,107 and 7,504,229; a CryET33 and CryET34 homologs of US Patent Publication Number 2006/0191034, 2012/0278954, and PCT Publication Number WO 2012/139004; a Cry35Ab1 protein of U.S. Pat. Nos. 6,083,499, 6,548,291 and 6,340,593; a Cry46 protein, a Cry 51 protein, a Cry binary toxin; a TIC901 or related toxin; TIC807 of US 2008/0295207; ET29, ET37, TIC809, TIC810, TIC812, TIC127, TIC128 of PCT US 2006/033867; AXMI-027, AXMI-036, and AXMI-038 of U.S. Pat. No. 8,236,757; AXMI-031, AXMI-039, AXMI-040, AXMI-049 of U.S. Pat. No. 7,923,602; AXMI-018, AXMI-020, and AXMI-021 of WO 2006/083891; AXMI-010 of WO 2005/038032; AXMI-003 of WO 2005/021585; AXMI-008 of US 2004/0250311; AXMI-006 of US 2004/0216186; AXMI-007 of US 2004/0210965; AXMI-009 of US 2004/0210964; AXMI-014 of US 2004/0197917; AXMI-004 of US 2004/0197916; AXMI-028 and AXMI-029 of WO 2006/119457; AXMI-007, AXMI-008, AXMI-0080rf2, AXMI-009, AXMI-014 and AXMI-004 of WO 2004/074462; AXMI-150 of U.S. Pat. No. 8,084,416; AXMI-205 of US201 10023184; AXMI-011, AXMI-012, AXMI-013, AXMI-015, AXMI-019, AXMI-044, AXMI-037, AXMI-043, AXMI-033, AXMI-034, AXMI-022, AXMI-023, AXMI-041, AXMI-063, and AXMI-064 of US 2011/0263488; AXMI-R1 and related proteins of US 2010/0197592; AXM1221Z, AXM1222z, AXM1223z, AXM1224z and AXM1225z of WO 2011/103248; AXM1218, AXM1219, AXM1220, AXM1226, AXM1227, AXM1228, AXM1229, AXM1230, and AXM1231 of WO11/103247; AXMI-115, AXMI-113, AXMI-005, AXMI-163 and AXMI-184 of U.S. Pat. No. 8,334,431; AXMI-001, AXMI-002, AXMI-030, AXMI-035, and AXMI-045 of US 2010/0298211; AXMI-066 and AXMI-076 of US20090144852; AXM1128, AXM1130, AXM1131, AXM1133, AXM1140, AXM1141, AXM1142, AXM1143, AXM1144, AXM1146, AXM1148, AXM1149, AXM1152, AXM1153, AXM1154, AXM1155, AXM1156, AXM1157, AXM1158, AXM1162, AXM1165, AXM1166, AXM1167, AXM1168, AXM1169, AXM1170, AXM1171, AXM1172, AXM1173, AXM1174, AXM1175, AXM1176, AXM1177, AXM1178, AXM1179, AXM1180, AXM1181, AXM1182, AXM1185, AXM1186, AXM1187, AXM1188, AXM1189 of U.S. Pat. No. 8,318,900; AXM1079, AXM1080, AXM1081, AXM1082, AXM1091, AXM1092, AXM1096, AXM1097, AXM1098, AXM1099, AXM1100, AXM1101, AXM1102, AXM1103, AXM1104, AXM1107, AXM1108, AXM1109, AXM1110, AXM1111, AXM1112, AXM1114, AXM1116, AXM1117, AXM1118, AXM1119, AXM1120, AXM1121, AXM1122, AXM1123, AXM1124, AXM11257, AXM11268, AXM1127, AXM1129, AXM1164, AXM1151, AXM1161, AXM1183, AXM1132, AXM1138, AXM1137 of US 2010/0005543; and Cry proteins such as Cry1A and Cry3A having modified proteolytic sites of U.S. Pat. No. 8,319,019; and a Cry1Ac, Cry2Aa and Cry1Ca toxin protein from Bacillus thuringiensis strain VBTS 2528 of US Patent Application Publication Number 2011/0064710. Other Cry proteins are well known to one skilled in the art (see, Crickmore, et al., “Bacillus thuringiensis toxin nomenclature” (2011), at lifesci.sussex.ac.uk/home/Neil_Crickmore/Bt/which can be accessed on the world-wide web using the “www” prefix). The insecticidal activity of Cry proteins is well known to one skilled in the art (for review, see, van Frannkenhuyzen, (2009) J. Invert. Path. 101:1-16). The use of Cry proteins as transgenic plant traits is well known to one skilled in the art and Cry-transgenic plants including but not limited to Cry1Ac, Cry1Ac+Cry2Ab, Cry1Ab, Cry1A.105, Cry1F, Cry1Fa2, Cry1F+Cry1Ac, Cry2Ab, Cry3A, mCry3A, Cry3Bb1, Cry34Ab1, Cry35Ab1, Vip3A, mCry3A, Cry9c and CBI-Bt have received regulatory approval (see, Sanahuja, (2011) Plant Biotech Journal 9:283-300 and the CERA (2010) GM Crop Database Center for Environmental Risk Assessment (CERA), ILSI Research Foundation, Washington D.C. at cera-gmc.org/index.php?action=gm_crop database which can be accessed on the world-wide web using the “www” prefix). More than one pesticidal proteins well known to one skilled in the art can also be expressed in plants such as Vip3Ab & Cry1Fa (US2012/0317682), Cry1BE & Cry1F (US2012/0311746), Cry1CA & Cry1AB (US2012/0311745), Cry1F & CryCa (US2012/0317681), Cry1DA & Cry1BE (US2012/0331590), Cry1DA & Cry1Fa (US2012/0331589), Cry1AB & Cry1BE (US2012/0324606), and Cry1Fa & Cry2Aa, Cry1 I or Cry1E (US2012/0324605). Pesticidal proteins also include insecticidal lipases including lipid acyl hydrolases of U.S. Pat. No. 7,491,869, and cholesterol oxidases such as from Streptomyces (Purcell et al. (1993) Biochem Biophys Res Commun 15:1406-1413). Pesticidal proteins also include VIP (vegetative insecticidal proteins) toxins of U.S. Pat. Nos. 5,877,012, 6,107,279, 6,137,033, 7,244,820, 7,615,686, and 8,237,020, and the like. Other VIP proteins are well known to one skilled in the art (see, lifesci.sussex.ac.uk/home/Neil_Crickmore/Bt/vip.html which can be accessed on the world-wide web using the “www” prefix). Pesticidal proteins also include toxin complex (TC) proteins, obtainable from organisms such as Xenorhabdus, Photorhabdus and Paenibacillus (see, U.S. Pat. Nos. 7,491,698 and 8,084,418). Some TC proteins have “stand alone” insecticidal activity and other TC proteins enhance the activity of the stand-alone toxins produced by the same given organism. The toxicity of a “stand-alone” TC protein (from Photorhabdus, Xenorhabdus or Paenibacillus, for example) can be enhanced by one or more TC protein “potentiators” derived from a source organism of a different genus. There are three main types of TC proteins. As referred to herein, Class A proteins (“Protein A”) are stand-alone toxins. Class B proteins (“Protein B”) and Class C proteins (“Protein C”) enhance the toxicity of Class A proteins. Examples of Class A proteins are TcbA, TcdA, XptA1 and XptA2. Examples of Class B proteins are TcaC, TcdB, XptB1Xb and XptC1Wi. Examples of Class C proteins are TccC, XptC1Xb and XptB1Wi. Pesticidal proteins also include spider, snake and scorpion venom proteins. Examples of spider venom peptides include but are not limited to lycotoxin-1 peptides and mutants thereof (U.S. Pat. No. 8,334,366).

[0295] (C) A polynucleotide encoding an insect-specific hormone or pheromone such as an ecdysteroid and juvenile hormone, a variant thereof, a mimetic based thereon or an antagonist or agonist thereof. See, for example, the disclosure by Hammock, et al., (1990) Nature 344:458, of baculovirus expression of cloned juvenile hormone esterase, an inactivator of juvenile hormone.

[0296] (D) A polynucleotide encoding an insect-specific peptide which, upon expression, disrupts the physiology of the affected pest. For example, see the disclosures of, Regan, (1994) J. Biol. Chem. 269:9 (expression cloning yields DNA coding for insect diuretic hormone receptor); Pratt, et al., (1989) Biochem. Biophys. Res. Comm. 163:1243 (an allostatin is identified in Diploptera puntata); Chattopadhyay, et al., (2004) Critical Reviews in Microbiology 30(1):33-54; Zjawiony, (2004) J Nat Prod 67(2):300-310; Carlini and Grossi-de-Sa, (2002) Toxicon 40(11):1515-1539; Ussuf, et al., (2001) Curr Sci. 80(7):847-853 and Vasconcelos and Oliveira, (2004) Toxicon 44(4):385-403. See also, U.S. Pat. No. 5,266,317 to Tomalski, et al., who disclose genes encoding insect-specific toxins.

[0297] (E) A polynucleotide encoding an enzyme responsible for a hyperaccumulation of a monoterpene, a sesquiterpene, a steroid, hydroxamic acid, a phenylpropanoid derivative or another non-protein molecule with insecticidal activity.

[0298] (F) A polynucleotide encoding an enzyme involved in the modification, including the post-translational modification, of a biologically active molecule; for example, a glycolytic enzyme, a proteolytic enzyme, a lipolytic enzyme, a nuclease, a cyclase, a transaminase, an esterase, a hydrolase, a phosphatase, a kinase, a phosphorylase, a polymerase, an elastase, a chitinase and a glucanase, whether natural or synthetic. See, PCT Application WO 1993/02197 in the name of Scott, et al., which discloses the nucleotide sequence of a callase gene. DNA molecules which contain chitinase-encoding sequences can be obtained, for example, from the ATCC® under Accession Numbers 39637 and 67152. See also, Kramer, et al., (1993) Insect Biochem. Molec. Biol. 23:691, who teach the nucleotide sequence of a cDNA encoding tobacco hookworm chitinase and Kawalleck, et al., (1993) Plant Molec. Biol. 21:673, who provide the nucleotide sequence of the parsley ubi4-2 polyubiquitin gene, and U.S. Pat. Nos. 6,563,020; 7,145,060 and 7,087,810.

[0299] (G) A polynucleotide encoding a molecule that stimulates signal transduction. For example, see the disclosure by Botella, et al., (1994) Plant Molec. Biol. 24:757, of nucleotide sequences for mung bean calmodulin cDNA clones, and Griess, et al., (1994) Plant Physiol. 104:1467, who provide the nucleotide sequence of a maize calmodulin cDNA clone.

[0300] (H) A polynucleotide encoding a hydrophobic moment peptide. See, PCT Application WO 1995/16776 and U.S. Pat. No. 5,580,852 disclosure of peptide derivatives of Tachyplesin which inhibit fungal plant pathogens) and PCT Application WO 1995/18855 and U.S. Pat. No. 5,607,914 (teaches synthetic antimicrobial peptides that confer disease resistance).

[0301] (I) A polynucleotide encoding a membrane permease, a channel former or a channel blocker. For example, see the disclosure by Jaynes, et al., (1993) Plant Sci. 89:43, of heterologous expression of a cecropin-beta lytic peptide analog to render transgenic tobacco plants resistant to Pseudomonas solanacearum.

[0302] (J) A gene encoding a viral-invasive protein or a complex toxin derived therefrom. For example, the accumulation of viral coat proteins in transformed plant cells imparts resistance to viral infection and/or disease development effected by the virus from which the coat protein gene is derived, as well as by related viruses. See, Beachy, et al., (1990) Ann. Rev. Phytopathol. 28:451. Coat protein-mediated resistance has been conferred upon transformed plants against alfalfa mosaic virus, cucumber mosaic virus, tobacco streak virus, potato virus X, potato virus Y, tobacco etch virus, tobacco rattle virus and tobacco mosaic virus. Id.

[0303] (K) A gene encoding an insect-specific antibody or an immunotoxin derived therefrom. Thus, an antibody targeted to a critical metabolic function in the insect gut would inactivate an affected enzyme, killing the insect. Cf. Taylor, et al., Abstract #497, SEVENTH INT'L SYMPOSIUM ON MOLECULAR PLANT-MICROBE INTERACTIONS (Edinburgh, Scotland, 1994) (enzymatic inactivation in transgenic tobacco via production of single-chain antibody fragments).

[0304] (L) A gene encoding a virus-specific antibody. See, for example, Tavladoraki, et al., (1993) Nature 366:469, who show that transgenic plants expressing recombinant antibody genes are protected from virus attack.

[0305] (M) A polynucleotide encoding a developmental-arrestive protein produced in nature by a pathogen or a parasite. Thus, fungal endo alpha-1,4-D-polygalacturonases facilitate fungal colonization and plant nutrient release by solubilizing plant cell wall homo-alpha-1,4-D-galacturonase. See, Lamb, et al., (1992) Bio/Technology 10:1436. The cloning and characterization of a gene which encodes a bean endopolygalacturonase-inhibiting protein is described by Toubart, et al., (1992) Plant J. 2:367.

[0306] (N) A polynucleotide encoding a developmental-arrestive protein produced in nature by a plant. For example, Logemann, et al., (1992) Bio/Technology 10:305, have shown that transgenic plants expressing the barley ribosome-inactivating gene have an increased resistance to fungal disease.

[0307] (O) Genes involved in the Systemic Acquired Resistance (SAR) Response and/or the pathogenesis related genes. Briggs, (1995) Current Biology 5(2), Pieterse and Van Loon, (2004) Curr. Opin. Plant Bio. 7(4):456-64 and Somssich, (2003) Cell 113(7):815-6.

[0308] (P) Antifungal genes (Comelissen and Melchers, (1993) Pl. Physiol. 101:709-712 and Parijs, et al., (1991) Planta 183:258-264 and Bushnell, et al., (1998) Can. J. of Plant Path. 20(2):137-149. Also see, U.S. patent application Ser. Nos. 09/950,933; 11/619,645; 11/657,710; 11/748,994; 11/774,121 and U.S. Pat. Nos. 6,891,085 and 7,306,946. LysM Receptor-like kinases for the perception of chitin fragments as a first step in plant defense response against fungal pathogens (US 2012/0110696).

[0309] (Q) Detoxification genes, such as for fumonisin, beauvericin, moniliformin and zearalenone and their structurally related derivatives. For example, see, U.S. Pat. Nos. 5,716,820; 5,792,931; 5,798,255; 5,846,812; 6,083,736; 6,538,177; 6,388,171 and 6,812,380.

[0310] (R) A polynucleotide encoding a Cystatin and cysteine proteinase inhibitors. See, U.S. Pat. No. 7,205,453.

[0311] (S) Defensin genes. See, WO 2003/000863 and U.S. Pat. Nos. 6,911,577; 6,855,865; 6,777,592 and 7,238,781.

[0312] (T) Genes conferring resistance to nematodes. See, e.g., PCT Application WO 1996/30517; PCT Application WO 1993/19181, WO 2003/033651 and Urwin, et al., (1998) Planta 204:472-479, Williamson, (1999) Curr Opin Plant Bio. 2(4):327-31; U.S. Pat. Nos. 6,284,948 and 7,301,069 and miR164 genes (WO 2012/058266).

[0313] (U) Genes that confer resistance to Phytophthora Root Rot, such as the Rps 1, Rps 1-a, Rps 1-b, Rps 1-c, Rps 1-d, Rps 1-e, Rps 1-k, Rps 2, Rps 3-a, Rps 3-b, Rps 3-c, Rps 4, Rps 5, Rps 6, Rps 7 and other Rps genes. See, for example, Shoemaker, et al., Phytophthora Root Rot Resistance Gene Mapping in Soybean, Plant Genome IV Conference, San Diego, Calif. (1995).

[0314] (V) Genes that confer resistance to Brown Stem Rot, such as described in U.S. Pat. No. 5,689,035 and incorporated by reference for this purpose.

[0315] (W) Genes that confer resistance to Colletotrichum, such as described in US Patent Application Publication US 2009/0035765 and incorporated by reference for this purpose. This includes the Rcg locus that may be utilized as a single locus conversion.

2. Transgenes that Confer Resistance to a Herbicide, for Example:

[0316] (A) A polynucleotide encoding resistance to a herbicide that inhibits the growing point or meristem, such as an imidazolinone or a sulfonylurea. Exemplary genes in this category code for mutant ALS and AHAS enzyme as described, for example, by Lee, et al., (1988) EMBO J. 7:1241 and Miki, et al., (1990) Theor. Appl. Genet. 80:449, respectively. See also, U.S. Pat. Nos. 5,605,011; 5,013,659; 5,141,870; 5,767,361; 5,731,180; 5,304,732; 4,761,373; 5,331,107; 5,928,937 and 5,378,824; U.S. patent application Ser. No. 11/683,737 and International Publication WO 1996/33270.

[0317] (B) A polynucleotide encoding a protein for resistance to Glyphosate (resistance imparted by mutant 5-enolpyruvl-3-phosphikimate synthase (EPSP) and aroA genes, respectively) and other phosphono compounds such as glufosinate (phosphinothricin acetyl transferase (PAT) and Streptomyces hygroscopicus phosphinothricin acetyl transferase (bar) genes), and pyridinoxy or phenoxy proprionic acids and cyclohexones (ACCase inhibitor-encoding genes). See, for example, U.S. Pat. No. 4,940,835 to Shah, et al., which discloses the nucleotide sequence of a form of EPSPS which can confer glyphosate resistance. U.S. Pat. No. 5,627,061 to Barry, et al., also describes genes encoding EPSPS enzymes. See also, U.S. Pat. Nos. 6,566,587; 6,338,961; 6,248,876 B1; 6,040,497; 5,804,425; 5,633,435; 5,145,783; 4,971,908; 5,312,910; 5,188,642; 5,094,945, 4,940,835; 5,866,775; 6,225,114 B1; 6,130,366; 5,310,667; 4,535,060; 4,769,061; 5,633,448; 5,510,471; Re. 36,449; RE 37,287 E and 5,491,288 and International Publications EP 1173580; WO 2001/66704; EP 1173581 and EP 1173582, which are incorporated herein by reference for this purpose. Glyphosate resistance is also imparted to plants that express a gene encoding a glyphosate oxido-reductase enzyme as described more fully in U.S. Pat. Nos. 5,776,760 and 5,463,175, which are incorporated herein by reference for this purpose. In addition glyphosate resistance can be imparted to plants by the over expression of genes encoding glyphosate N-acetyltransferase. See, for example, U.S. Pat. Nos. 7,462,481; 7,405,074 and US Patent Application Publication Number US 2008/0234130. A DNA molecule encoding a mutant aroA gene can be obtained under ATCC® Accession Number 39256, and the nucleotide sequence of the mutant gene is disclosed in U.S. Pat. No. 4,769,061 to Comai. EP Application Number 0 333 033 to Kumada, et al., and U.S. Pat. No. 4,975,374 to Goodman, et al., disclose nucleotide sequences of glutamine synthetase genes which confer resistance to herbicides such as L-phosphinothricin. The nucleotide sequence of a phosphinothricin-acetyl-transferase gene is provided in EP Application Numbers 0 242 246 and 0 242 236 to Leemans, et al.; De Greef, et al., (1989) Bio/Technology 7:61, describe the production of transgenic plants that express chimeric bar genes coding for phosphinothricin acetyl transferase activity. See also, U.S. Pat. Nos. 5,969,213; 5,489,520; 5,550,318; 5,874,265; 5,919,675; 5,561,236; 5,648,477; 5,646,024; 6,177,616 B1 and 5,879,903, which are incorporated herein by reference for this purpose. Exemplary genes conferring resistance to phenoxy proprionic acids and cyclohexones, such as sethoxydim and haloxyfop, are the Acc1-S1, Acc1-S2 and Acc1-S3 genes described by Marshall, et al., (1992) Theor. Appl. Genet. 83:435.

[0318] (C) A polynucleotide encoding a protein for resistance to herbicide that inhibits photosynthesis, such as a triazine (psbA and gs+ genes) and a benzonitrile (nitrilase gene). Przibilla, et al., (1991) Plant Cell 3:169, describe the transformation of Chlamydomonas with plasmids encoding mutant psbA genes. Nucleotide sequences for nitrilase genes are disclosed in U.S. Pat. No. 4,810,648 to Stalker and DNA molecules containing these genes are available under ATCC® Accession Numbers 53435, 67441 and 67442. Cloning and expression of DNA coding for a glutathione S-transferase is described by Hayes, et al., (1992) Biochem. J. 285:173.

[0319] (D) A polynucleotide encoding a protein for resistance to Acetohydroxy acid synthase, which has been found to make plants that express this enzyme resistant to multiple types of herbicides, has been introduced into a variety of plants (see, e.g., Hattori, et al., (1995) Mol Gen Genet. 246:419). Other genes that confer resistance to herbicides include: a gene encoding a chimeric protein of rat cytochrome P4507A1 and yeast NADPH-cytochrome P450 oxidoreductase (Shiota, et al., (1994) Plant Physiol 106:17), genes for glutathione reductase and superoxide dismutase (Aono, et al., (1995) Plant Cell Physiol 36:1687) and genes for various phosphotransferases (Datta, et al., (1992) Plant Mol Biol 20:619).

[0320] (E) A polynucleotide encoding resistance to a herbicide targeting Protoporphyrinogen oxidase (protox) which is necessary for the production of chlorophyll. The protox enzyme serves as the target for a variety of herbicidal compounds. These herbicides also inhibit growth of all the different species of plants present, causing their total destruction. The development of plants containing altered protox activity which are resistant to these herbicides are described in U.S. Pat. Nos. 6,288,306 B1; 6,282,837 B1 and 5,767,373 and International Publication WO 2001/12825.

[0321] (F) The aad-1 gene (originally from Sphingobium herbicidovorans) encodes the aryloxyalkanoate dioxygenase (AAD-1) protein. The trait confers tolerance to 2,4-dichlorophenoxyacetic acid and aryloxyphenoxypropionate (commonly referred to as “fop” herbicides such as quizalofop) herbicides. The aad-1 gene, itself, for herbicide tolerance in plants was first disclosed in WO 2005/107437 (see also, US 2009/0093366). The aad-12 gene, derived from Delftia acidovorans, which encodes the aryloxyalkanoate dioxygenase (AAD-12) protein that confers tolerance to 2,4-dichlorophenoxyacetic acid and pyridyloxyacetate herbicides by deactivating several herbicides with an aryloxyalkanoate moiety, including phenoxy auxin (e.g., 2,4-D, MCPA), as well as pyridyloxy auxins (e.g., fluroxypyr, triclopyr).

[0322] (G) A polynucleotide encoding a herbicide resistant dicamba monooxygenase disclosed in US Patent Application Publication 2003/0135879 for imparting dicamba tolerance;

[0323] (H) A polynucleotide molecule encoding bromoxynil nitrilase (Bxn) disclosed in U.S. Pat. No. 4,810,648 for imparting bromoxynil tolerance;

[0324] (I) A polynucleotide molecule encoding phytoene (crti) described in Misawa, et al., (1993) Plant J. 4:833-840 and in Misawa, et al., (1994) Plant J. 6:481-489 for norflurazon tolerance.

3. Transgenes that Confer or Contribute to an Altered Grain Characteristic

[0325] Such as:

[0326] (A) Altered fatty acids, for example, by

[0327] (1) Down-regulation of stearoyl-ACP to increase stearic acid content of the plant. See, Knultzon, et al., (1992) Proc. Natl. Acad. Sci. USA 89:2624 and WO 1999/64579 (Genes to Alter Lipid Profiles in Corn).

[0328] (2) Elevating oleic acid via FAD-2 gene modification and/or decreasing linolenic acid via FAD-3 gene modification (see, U.S. Pat. Nos. 6,063,947; 6,323,392; 6,372,965 and WO 1993/11245).

[0329] (3) Altering conjugated linolenic or linoleic acid content, such as in WO 2001/12800.

[0330] (4) Altering LEC1, AGP, Dek1, Superal1, mi1 ps, various Ipa genes such as Ipa1, Ipa3, hpt or hggt. For example, see, WO 2002/42424, WO 1998/22604, WO 2003/011015, WO 2002/057439, WO 2003/011015, U.S. Pat. Nos. 6,423,886, 6,197,561, 6,825,397 and US Patent Application Publication Numbers US 2003/0079247, US 2003/0204870 and Rivera-Madrid, et al., (1995) Proc. Natl. Acad. Sci. 92:5620-5624.

[0331] (5) Genes encoding delta-8 desaturase for making long-chain polyunsaturated fatty acids (U.S. Pat. Nos. 8,058,571 and 8,338,152), delta-9 desaturase for lowering saturated fats (U.S. Pat. No. 8,063,269), Primula Δ6-desaturase for improving omega-3 fatty acid profiles.

[0332] (6) Isolated nucleic acids and proteins associated with lipid and sugar metabolism regulation, in particular, lipid metabolism protein (LMP) used in methods of producing transgenic plants and modulating levels of seed storage compounds including lipids, fatty acids, starches or seed storage proteins and use in methods of modulating the seed size, seed number, seed weights, root length and leaf size of plants (EP 2404499).

[0333] (7) Altering expression of a High-Level Expression of Sugar-Inducible 2 (HS12) protein in the plant to increase or decrease expression of HS12 in the plant. Increasing expression of HS12 increases oil content while decreasing expression of HS12 decreases abscisic acid sensitivity and/or increases drought resistance (US Patent Application Publication Number 2012/0066794).

[0334] (8) Expression of cytochrome b5 (Cb5) alone or with FAD2 to modulate oil content in plant seed, particularly to increase the levels of omega-3 fatty acids and improve the ratio of omega-6 to omega-3 fatty acids (US Patent Application Publication Number 2011/0191904).

[0335] (9) Nucleic acid molecules encoding wrinkled1-like polypeptides for modulating sugar metabolism (U.S. Pat. No. 8,217,223).

[0336] (B) Altered phosphorus content, for example, by the

[0337] (1) Introduction of a phytase-encoding gene would enhance breakdown of phytate, adding more free phosphate to the transformed plant. For example, see, Van Hartingsveldt, et al., (1993) Gene 127:87, for a disclosure of the nucleotide sequence of an Aspergillus niger phytase gene.

[0338] (2) Modulating a gene that reduces phytate content. In maize, this, for example, could be accomplished, by cloning and then re-introducing DNA associated with one or more of the alleles, such as the LPA alleles, identified in maize mutants characterized by low levels of phytic acid, such as in WO 2005/113778 and/or by altering inositol kinase activity as in WO 2002/059324, US Patent Application Publication Number 2003/0009011, WO 2003/027243, US Patent Application Publication Number 2003/0079247, WO 1999/05298, U.S. Pat. Nos. 6,197,561, 6,291,224, 6,391,348, WO 2002/059324, US Patent Application Publication Number 2003/0079247, WO 1998/45448, WO 1999/55882, WO 2001/04147.

[0339] (C) Altered carbohydrates affected, for example, by altering a gene for an enzyme that affects the branching pattern of starch or, a gene altering thioredoxin such as NTR and/or TRX (see, U.S. Pat. No. 6,531,648. which is incorporated by reference for this purpose) and/or a gamma zein knock out or mutant such as cs27 or TUSC27 or en27 (see, U.S. Pat. No. 6,858,778 and US Patent Application Publication Number 2005/0160488, US Patent Application Publication Number 2005/0204418, which are incorporated by reference for this purpose). See, Shiroza, et al., (1988) J. Bacteriol. 170:810 (nucleotide sequence of Streptococcus mutant fructosyltransferase gene), Steinmetz, et al., (1985) Mol. Gen. Genet. 200:220 (nucleotide sequence of Bacillus subtilis levansucrase gene), Pen, et al., (1992) Bio/Technology 10:292 (production of transgenic plants that express Bacillus licheniformis alpha-amylase), Elliot, et al., (1993) Plant Molec. Biol. 21:515 (nucleotide sequences of tomato invertase genes), Smgaard, et al., (1993) J. Biol. Chem. 268:22480 (site-directed mutagenesis of barley alpha-amylase gene) and Fisher, et al., (1993) Plant Physiol. 102:1045 (maize endosperm starch branching enzyme II), WO 1999/10498 (improved digestibility and/or starch extraction through modification of UDP-D-xylose 4-epimerase, Fragile 1 and 2, Ref1, HCHL, C4H), U.S. Pat. No. 6,232,529 (method of producing high oil seed by modification of starch levels (AGP)). The fatty acid modification genes mentioned herein may also be used to affect starch content and/or composition through the interrelationship of the starch and oil pathways.

[0340] (D) Altered antioxidant content or composition, such as alteration of tocopherol or tocotrienols. For example, see, U.S. Pat. No. 6,787,683, US Patent Application Publication Number 2004/0034886 and WO 2000/68393 involving the manipulation of antioxidant levels and WO 2003/082899 through alteration of a homogentisate geranyl geranyl transferase (hggt).

[0341] (E) Altered essential seed amino acids. For example, see, U.S. Pat. No. 6,127,600 (method of increasing accumulation of essential amino acids in seeds), U.S. Pat. No. 6,080,913 (binary methods of increasing accumulation of essential amino acids in seeds), U.S. Pat. No. 5,990,389 (high lysine), WO 1999/40209 (alteration of amino acid compositions in seeds), WO 1999/29882 (methods for altering amino acid content of proteins), U.S. Pat. No. 5,850,016 (alteration of amino acid compositions in seeds), WO 1998/20133 (proteins with enhanced levels of essential amino acids), U.S. Pat. No. 5,885,802 (high methionine), U.S. Pat. No. 5,885,801 (high threonine), U.S. Pat. No. 6,664,445 (plant amino acid biosynthetic enzymes), U.S. Pat. No. 6,459,019 (increased lysine and threonine), U.S. Pat. No. 6,441,274 (plant tryptophan synthase beta subunit), U.S. Pat. No. 6,346,403 (methionine metabolic enzymes), U.S. Pat. No. 5,939,599 (high sulfur), U.S. Pat. No. 5,912,414 (increased methionine), WO 1998/56935 (plant amino acid biosynthetic enzymes), WO 1998/45458 (engineered seed protein having higher percentage of essential amino acids), WO 1998/42831 (increased lysine), U.S. Pat. No. 5,633,436 (increasing sulfur amino acid content), U.S. Pat. No. 5,559,223 (synthetic storage proteins with defined structure containing programmable levels of essential amino acids for improvement of the nutritional value of plants), WO 1996/01905 (increased threonine), WO 1995/15392 (increased lysine), US Patent Application Publication Number 2003/0163838, US Patent Application Publication Number 2003/0150014, US Patent Application Publication Number 2004/0068767, U.S. Pat. No. 6,803,498, WO 2001/79516.

4. Genes that Control Male-Sterility:

[0342] There are several methods of conferring genetic male sterility available, such as multiple mutant genes at separate locations within the genome that confer male sterility, as disclosed in U.S. Pat. Nos. 4,654,465 and 4,727,219 to Brar, et al., and chromosomal translocations as described by Patterson in U.S. Pat. Nos. 3,861,709 and 3,710,511. In addition to these methods, Albertsen, et al., U.S. Pat. No. 5,432,068, describe a system of nuclear male sterility which includes: identifying a gene which is critical to male fertility; silencing this native gene which is critical to male fertility; removing the native promoter from the essential male fertility gene and replacing it with an inducible promoter; inserting this genetically engineered gene back into the plant; and thus creating a plant that is male sterile because the inducible promoter is not “on” resulting in the male fertility gene not being transcribed. Fertility is restored by inducing or turning “on”, the promoter, which in turn allows the gene that confers male fertility to be transcribed.

[0343] (A) Introduction of a deacetylase gene under the control of a tapetum-specific promoter and with the application of the chemical N-Ac-PPT (WO 2001/29237).

[0344] (B) Introduction of various stamen-specific promoters (WO 1992/13956, WO 1992/13957).

[0345] (C) Introduction of the bamase and the barstar gene (Paul, et al., (1992) Plant Mol. Biol. 19:611-622).

[0346] For additional examples of nuclear male and female sterility systems and genes, see also, U.S. Pat. Nos. 5,859,341; 6,297,426; 5,478,369; 5,824,524; 5,850,014 and 6,265,640, all of which are hereby incorporated by reference.

5. Genes that Create a Site for Site Specific DNA Integration.

[0347] This includes the introduction of FRT sites that may be used in the FLP/FRT system and/or Lox sites that may be used in the Cre/Loxp system. For example, see, Lyznik, et al., (2003) Plant Cell Rep 21:925-932 and WO 1999/25821, which are hereby incorporated by reference. Other systems that may be used include the Gln recombinase of phage Mu (Maeser, et al., (1991) Vicki Chandler, The Maize Handbook ch. 118 (Springer-Verlag 1994), the Pin recombinase of E. coli (Enomoto, et al., 1983) and the R/RS system of the pSRi plasmid (Araki, et al., 1992).

6. Genes that Affect Ablotic Stress Resistance

[0348] Including but not limited to flowering, ear and seed development, enhancement of nitrogen utilization efficiency, altered nitrogen responsiveness, drought resistance or tolerance, cold resistance or tolerance and salt resistance or tolerance and increased yield under stress.

[0349] (A) For example, see: WO 2000/73475 where water use efficiency is altered through alteration of malate; U.S. Pat. Nos. 5,892,009, 5,965,705, 5,929,305, 5,891,859, 6,417,428, 6,664,446, 6,706,866, 6,717,034, 6,801,104, WO 2000/060089, WO 2001/026459, WO 2001/035725, WO 2001/034726, WO 2001/035727, WO 2001/036444, WO 2001/036597, WO 2001/036598, WO 2002/015675, WO 2002/017430, WO 2002/077185, WO 2002/079403, WO 2003/013227, WO 2003/013228, WO 2003/014327, WO 2004/031349, WO 2004/076638, WO 199809521.

[0350] (B) WO 199938977 describing genes, including CBF genes and transcription factors effective in mitigating the negative effects of freezing, high salinity and drought on plants, as well as conferring other positive effects on plant phenotype.

[0351] (C) US Patent Application Publication Number 2004/0148654 and WO 2001/36596 where abscisic acid is altered in plants resulting in improved plant phenotype such as increased yield and/or increased tolerance to abiotic stress.

[0352] (D) WO 2000/006341, WO 2004/090143, U.S. Pat. Nos. 7,531,723 and 6,992,237 where cytokinin expression is modified resulting in plants with increased stress tolerance, such as drought tolerance, and/or increased yield. Also see, WO 2002/02776, WO 2003/052063, JP 2002/281975, U.S. Pat. No. 6,084,153, WO 2001/64898, U.S. Pat. Nos. 6,177,275 and 6,107,547 (enhancement of nitrogen utilization and altered nitrogen responsiveness).

[0353] (E) For ethylene alteration, see, US Patent Application Publication Number 2004/0128719, US Patent Application Publication Number 2003/0166197 and WO 2000/32761.

[0354] (F) For plant transcription factors or transcriptional regulators of abiotic stress, see, e.g., US Patent Application Publication Number 2004/0098764 or US Patent Application Publication Number 2004/0078852.

[0355] (G) Genes that increase expression of vacuolar pyrophosphatase such as AVP1 (U.S. Pat. No. 8,058,515) for increased yield; nucleic acid encoding a HSFA4 or a HSFA5 (Heat Shock Factor of the class A4 or A5) polypeptides, an oligopeptide transporter protein (OPT4-like) polypeptide; a plastochron2-like (PLA2-like) polypeptide or a Wuschel related homeobox 1-like (WOX1-like) polypeptide (U. Patent Application Publication Number US 2011/0283420).

[0356] (H) Down regulation of polynucleotides encoding poly (ADP-ribose) polymerase (PARP) proteins to modulate programmed cell death (U.S. Pat. No. 8,058,510) for increased vigor.

[0357] (I) Polynucleotide encoding DTP21 polypeptides for conferring drought resistance (US Patent Application Publication Number US 2011/0277181).

[0358] (J) Nucleotide sequences encoding ACC Synthase 3 (ACS3) proteins for modulating development, modulating response to stress, and modulating stress tolerance (US Patent Application Publication Number US 2010/0287669).

[0359] (K) Polynucleotides that encode proteins that confer a drought tolerance phenotype (DTP) for conferring drought resistance (WO 2012/058528).

[0360] (L) Tocopherol cyclase (TC) genes for conferring drought and salt tolerance (US Patent Application Publication Number 2012/0272352).

[0361] (M) CAAX amino terminal family proteins for stress tolerance (U.S. Pat. No. 8,338,661).

[0362] (N) Mutations in the SAL1 encoding gene have increased stress tolerance, including increased drought resistant (US Patent Application Publication Number 2010/0257633).

[0363] (O) Expression of a nucleic acid sequence encoding a polypeptide selected from the group consisting of: GRF polypeptide, RAA1-like polypeptide, SYR polypeptide, ARKL polypeptide, and YTP polypeptide increasing yield-related traits (US Patent Application Publication Number 2011/0061133).

[0364] (P) Modulating expression in a plant of a nucleic acid encoding a Class Ill Trehalose Phosphate Phosphatase (TPP) polypeptide for enhancing yield-related traits in plants, particularly increasing seed yield (US Patent Application Publication Number 2010/0024067).

[0365] Other genes and transcription factors that affect plant growth and agronomic traits such as yield, flowering, plant growth and/or plant structure, can be introduced or introgressed into plants, see e.g., WO 1997/49811 (LHY), WO 1998/56918 (ESD4), WO 1997/10339 and U.S. Pat. No. 6,573,430 (TFL), U.S. Pat. No. 6,713,663 (FT), WO 1996/14414 (CON), WO 1996/38560, WO 2001/21822 (VRN1), WO 2000/44918 (VRN2), WO 1999/49064 (GI), WO 2000/46358 (FR1), WO 1997/29123, U.S. Pat. Nos. 6,794,560, 6,307,126 (GAl), WO 1999/09174 (D8 and Rht) and WO 2004/076638 and WO 2004/031349 (transcription factors).

7. Genes that Confer Increased Yield

[0366] (A) A transgenic crop plant transformed by a 1-AminoCyclopropane-1-Carboxylate Deaminase-like Polypeptide (ACCDP) coding nucleic acid, wherein expression of the nucleic acid sequence in the crop plant results in the plant's increased root growth, and/or increased yield, and/or increased tolerance to environmental stress as compared to a wild type variety of the plant (U.S. Pat. No. 8,097,769).

[0367] (B) Over-expression of maize zinc finger protein gene (Zm-ZFP1) using a seed preferred promoter has been shown to enhance plant growth, increase kernel number and total kernel weight per plant (US Patent Application Publication Number 2012/0079623).

[0368] (C) Constitutive over-expression of maize lateral organ boundaries (LOB) domain protein (Zm-LOBDP1) has been shown to increase kernel number and total kernel weight per plant (US Patent Application Publication Number 2012/0079622).

[0369] (D) Enhancing yield-related traits in plants by modulating expression in a plant of a nucleic acid encoding a VIM1 (Variant in Methylation 1)-like polypeptide or a VTC2-like (GDP-L-galactose phosphorylase) polypeptide or a DUF1685 polypeptide or an ARF6-like (Auxin Responsive Factor) polypeptide (WO 2012/038893).

[0370] (E) Modulating expression in a plant of a nucleic acid encoding a Ste20-like polypeptide or a homologue thereof gives plants having increased yield relative to control plants (EP 2431472).

[0371] (F) Genes encoding nucleoside diphosphatase kinase (NDK) polypeptides and homologs thereof for modifying the plant's root architecture (US Patent Application Publication Number 2009/0064373).

8. Genes that Confer Plant Digestibility.

[0372] (A) Altering the level of xylan present in the cell wall of a plant by modulating expression of xylan synthase (U.S. Pat. No. 8,173,866).

[0373] In some embodiment the stacked trait may be a trait or event that has received regulatory approval including but not limited to the events in Table 5A-5F.

TABLE 5

| | | |
|---|---|---|
| Event | Company | Description |

A Medicago sativa Alfalfa

| | | |
|---|---|---|
| J101, J163 | Monsanto Company and | Glyphosate herbicide tolerant alfalfa (lucerne) |
| | Forage Genetics | produced by inserting a gene encoding the enzyme |
| | International | 5-enolypyruvylshikimate-3-phosphate synthase |
| | | (EPSPS) from the CP4 strain of Agrobacterium |
| | | tumefaciens. |

B Helianthus annuus Sunflower

| | | |
|---|---|---|
| X81359 | BASF Inc. | Tolerance to imidazolinone herbicides by |
| | | selection of a naturally occurring mutant. |

C Oryza sativa Rice

| | | |
|---|---|---|
| CL121, CL141, CFX51 | BASF Inc. | Tolerance to the imidazolinone herbicide, |
| | | imazethapyr, induced by chemical mutagenesis of |
| | | the acetolactate synthase (ALS) enzyme using ethyl |
| | | methanesulfonate (EMS). |
| IMINTA-1, IMINTA-4 | BASF Inc. | Tolerance to imidazolinone herbicides induced by |
| | | chemical mutagenesis of the acetolactate synthase |
| | | (ALS) enzyme using sodium azide. |
| LLRICE06, LLRICE62 | Aventis CropScience | Glufosinate ammonium herbicide tolerant rice |
| | | produced by inserting a modified phosphinothricin |
| | | acetyltransferase (PAT) encoding gene from the soil |
| | | bacterium Streptomyces hygroscopicus). |
| LLRICE601 | Bayer CropScience | Glufosinate ammonium herbicide tolerant rice |
| | (Aventis | produced by inserting a modified phosphinothricin |
| | CropScience(AgrEvo)) | acetyltransferase (PAT) encoding gene from the soil |
| | | bacterium Streptomyces hygroscopicus). |
| PWC16 | BASF Inc. | Tolerance to the imidazolinone herbicide, |
| | | imazethapyr, induced by chemical mutagenesis of |
| | | the acetolactate synthase (ALS) enzyme using ethyl |
| | | methanesulfonate (EMS). |

C Triticum aestivum Wheat

| | | |
|---|---|---|
| AP205CL | BASF Inc. | Selection for a mutagenized version of the enzyme |
| | | acetohydroxyacid synthase (AHAS), also known as |
| | | acetolactate synthase (ALS) or acetolactate |
| | | pyruvate- lyase. |
| AP602CL | BASF Inc. | Selection for a mutagenized version of the enzyme |
| | | acetohydroxyacid synthase (AHAS), also known as |
| | | acetolactate synthase (ALS) or acetolactate |
| | | pyruvate- lyase. |
| BW255-2, BW238-3 | BASF Inc. | Selection for a mutagenized version of the enzyme |
| | | acetohydroxyacid synthase (AHAS), also known as |
| | | acetolactate synthase (ALS) or acetolactate |
| | | pyruvate- lyase. |
| BW7 | BASF Inc. | Tolerance to imidazolinone herbicides induced by |
| | | chemical mutagenesis of the acetohydroxyacid |
| | | synthase (AHAS) gene using sodium azide. |
| MON71800 | Monsanto Company | Glyphosate tolerant wheat variety produced by |
| | | inserting a modified 5-enolpyruvylshikimate-3- |
| | | phosphate synthase (EPSPS) encoding gene from |
| | | the soil bacterium Agrobacterium tumefaciens, strain |
| | | CP4. |
| SWP965001 | Cyanamid Crop | Selection for a mutagenized version of the enzyme |
| | Protection | acetohydroxyacid synthase (AHAS), also known as |
| | | acetolactate synthase (ALS) or acetolactate |
| | | pyruvate- lyase. |
| Teal 11A | BASF Inc. | Selection for a mutagenized version of the enzyme |
| | | acetohydroxyacid synthase (AHAS), also known as |
| | | acetolactate synthase (ALS) or acetolactate |
| | | pyruvate- lyase. |

E Glycine max L. Soybean

| | | |
|---|---|---|
| A2704-12, A2704-21, | Bayer CropScience | Glufosinate ammonium herbicide tolerant soybean |
| A5547-35 | (Aventis CropScience | produced by inserting a modified phosphinothricin |
| | (AgrEvo)) | acetyltransferase (PAT) encoding gene from the soil |
| | | bacterium Streptomyces viridochromogenes. |
| A5547-127 | Bayer CropScience | Glufosinate ammonium herbicide tolerant soybean |
| | (Aventis CropScience | produced by inserting a modified phosphinothricin |
| | (AgrEvo)) | acetyltransferase (PAT) encoding gene from the soil |
| | | bacterium Streptomyces viridochromogenes. |
| BPS-CV127-9 | BASF Inc. | The introduced csr1-2 gene from Arabidopsis |
| | | thaliana encodes an acetohydroxyacid synthase |
| | | protein that confers tolerance to imidazolinone |
| | | herbicides due to a point mutation that results in a |
| | | single amino acid substitution in which the serine |
| | | residue at position 653 is replaced by asparagine |
| | | (S653N). |
| DP-305423 | Pioneer Hi-Bred | High oleic acid soybean produced by inserting |
| | International Inc. | additional copies of a portion of the omega-6 |
| | | desaturase encoding gene, gm-fad2-1 resulting in |
| | | silencing of the endogenous omega-6 desaturase |
| | | gene (FAD2-1). |
| DP356043 | Pioneer Hi-Bred | Soybean event with two herbicide tolerance genes: |
| | International Inc. | glyphosate N-acetlytransferase, which detoxifies |
| | | glyphosate, and a modified acetolactate synthase |
| | | (ALS) gene which is tolerant to ALS-inhibiting |
| | | herbicides. |
| G94-1, G94-19, G168 | DuPont Canada | High oleic acid soybean produced by inserting a |
| | Agricultural Products | second copy of the fatty acid desaturase (GmFad2- |
| | | 1) encoding gene from soybean, which resulted in |
| | | “silencing” of the endogenous host gene. |
| GTS 40-3-2 | Monsanto Company | Glyphosate tolerant soybean variety produced by |
| | | inserting a modified 5-enolpyruvylshikimate-3- |
| | | phosphate synthase (EPSPS) encoding gene from |
| | | the soil bacterium Agrobacterium tumefaciens. |
| GU262 | Bayer CropScience | Glufosinate ammonium herbicide tolerant soybean |
| | (Aventis | produced by inserting a modified phosphinothricin |
| | CropScience(AgrEvo)) | acetyltransferase (PAT) encoding gene from the soil |
| | | bacterium Streptomyces viridochromogenes. |
| MON87701 | Monsanto Company | Resistance to Lepidopteran pests of soybean |
| | | including velvetbean caterpillar (Anticarsia |
| | | gemmatalis) and soybean looper (Pseudoplusia |
| | | includens). |
| MON87701 × MON89788 | Monsanto Company | Glyphosate herbicide tolerance through expression |
| | | of the EPSPS encoding gene from A. tumefaciens |
| | | strain CP4, and resistance to Lepidopteran pests of |
| | | soybean including velvetbean caterpillar (Anticarsia |
| | | gemmatalis) and soybean looper (Pseudoplusia |
| | | includens) via expression of the Cry1Ac encoding |
| | | gene from B. thuringiensis. |
| MON89788 | Monsanto Company | Glyphosate-tolerant soybean produced by inserting |
| | | a modified 5-enolpyruvylshikimate-3-phosphate |
| | | synthase (EPSPS) encoding aroA (epsps) gene |
| | | from Agrobacterium tumefaciens CP4. |
| OT96-15 | Agriculture & Agri-Food | Low linolenic acid soybean produced through |
| | Canada | traditional cross-breeding to incorporate the novel |
| | | trait from a naturally occurring fan1 gene mutant that |
| | | was selected for low linolenic acid. |
| W62, W98 | Bayer CropScience | Glufosinate ammonium herbicide tolerant soybean |
| | (Aventis | produced by inserting a modified phosphinothricin |
| | CropScience(AgrEvo)) | acetyltransferase (PAT) encoding gene from the soil |
| | | bacterium Streptomyces hygroscopicus. |

F Zea mays L. Maize

| | | |
|---|---|---|
| 176 | Syngenta Seeds, Inc. | Insect-resistant maize produced by inserting the |
| | | Cry1Ab gene from Bacillus thuringiensis subsp. |
| | | kurstaki. The genetic modification affords resistance |
| | | to attack by the European corn borer (ECB). |
| 3751IR | Pioneer Hi-Bred | Selection of somaclonal variants by culture of |
| | International Inc. | embryos on imidazolinone containing media. |
| 676, 678, 680 | Pioneer Hi-Bred | Male-sterile and glufosinate ammonium herbicide |
| | International Inc. | tolerant maize produced by inserting genes |
| | | encoding DNA adenine methylase and |
| | | phosphinothricin acetyltransferase (PAT) from |
| | | Escherichia coli and Streptomyces |
| | | viridochromogenes, respectively. |
| B16 (DLL25) | Dekalb Genetics | Glufosinate ammonium herbicide tolerant maize |
| | Corporation | produced by inserting the gene encoding |
| | | phosphinothricin acetyltransferase (PAT) from |
| | | Streptomyces hygroscopicus. |
| BT11 (X4334CBR, | Syngenta Seeds, Inc. | Insect-resistant and herbicide tolerant maize |
| X4734CBR) | | produced by inserting the Cry1Ab gene from |
| | | Bacillus thuringiensis subsp. kurstaki, and the |
| | | phosphinothricin N-acetyltransferase (PAT) |
| | | encoding gene from S. viridochromogenes. |
| BT11 × GA21 | Syngenta Seeds, Inc. | Stacked insect resistant and herbicide tolerant |
| | | maize produced by conventional cross breeding of |
| | | parental lines BT11 (OECD unique identifier: SYN- |
| | | BTO11-1) and GA21 (OECD unique identifier: MON- |
| | | OOO21-9). |
| BT11 × MIR162 × | Syngenta Seeds, Inc. | Resistance to Coleopteran pests, particularly corn |
| MIR604 × GA21 | | rootworm pests (Diabrotica spp.) and several |
| | | Lepidopteran pests of corn, including European corn |
| | | borer (ECB, Ostrinia nubilalis), corn earworm (CEW, |
| | | Helicoverpa zea), fall army worm (FAW, Spodoptera |
| | | frugiperda), and black cutworm (BCW, Agrotis |
| | | ipsilon); tolerance to glyphosate and glufosinate- |
| | | ammonium containing herbicides. |
| BT11 × MIR162 | Syngenta Seeds, Inc. | Stacked insect resistant and herbicide tolerant |
| | | maize produced by conventional cross breeding of |
| | | parental lines BT11 (OECD unique identifier: SYN- |
| | | BTO11-1) and MIR162 (OECD unique identifier: |
| | | SYN-IR162-4). Resistance to the European Corn |
| | | Borer and tolerance to the herbicide glufosinate |
| | | ammonium (Liberty) is derived from BT11, which |
| | | contains the Cry1Ab gene from Bacillus |
| | | thuringiensis subsp. kurstaki, and the |
| | | phosphinothricin N-acetyltransferase (PAT) |
| | | encoding gene from S. viridochromogenes. |
| | | Resistance to other Lepidopteran pests, including H. |
| | | zea, S. frugiperda, A. ipsilon, and S. albicosta, is |
| | | derived from MIR162, which contains the vip3Aa |
| | | gene from Bacillus thuringiensis strain AB88. |
| BT11 × MIR162 × MIR604 | Syngenta Seeds, Inc. | Bacillus thuringiensis Cry1Ab delta-endotoxin |
| | | protein and the genetic material necessary for its |
| | | production (via elements of vector pZO1502) in |
| | | Event Bt11 corn (OECD Unique Identifier: SYN- |
| | | BTO11-1) × Bacillus thuringiensis Vip3Aa20 |
| | | insecticidal protein and the genetic material |
| | | necessary for its production (via elements of vector |
| | | pNOV1300) in Event MIR162 maize (OECD Unique |
| | | Identifier: SYN-IR162-4) × modified Cry3A protein |
| | | and the genetic material necessary for its production |
| | | (via elements of vector pZM26) in Event MIR604 |
| | | corn (OECD Unique Identifier: SYN-IR604-5). |
| CBH-351 | Aventis CropScience | Insect-resistant and glufosinate ammonium |
| | | herbicide tolerant maize developed by inserting |
| | | genes encoding Cry9C protein from Bacillus |
| | | thuringiensis subsp tolworthi and phosphinothricin |
| | | acetyltransferase (PAT) from Streptomyces |
| | | hygroscopicus. |
| DAS-06275-8 | DOW AgroSciences LLC | Lepidopteran insect resistant and glufosinate |
| | | ammonium herbicide-tolerant maize variety |
| | | produced by inserting the Cry1F gene from Bacillus |
| | | thuringiensis var aizawai and the phosphinothricin |
| | | acetyltransferase (PAT) from Streptomyces |
| | | hygroscopicus. |
| BT11 × MIR604 | Syngenta Seeds, Inc. | Stacked insect resistant and herbicide tolerant |
| | | maize produced by conventional cross breeding of |
| | | parental lines BT11 (OECD unique identifier: SYN- |
| | | BTO11-1) and MIR604 (OECD unique identifier: |
| | | SYN-IR6O5-5). Resistance to the European Corn |
| | | Borer and tolerance to the herbicide glufosinate |
| | | ammonium (Liberty) is derived from BT11, which |
| | | contains the Cry1Ab gene from Bacillus |
| | | thuringiensis subsp. kurstaki, and the |
| | | phosphinothricin N-acetyltransferase (PAT) |
| | | encoding gene from S. viridochromogenes. Corn |
| | | rootworm-resistance is derived from MIR604 which |
| | | contains the mCry3A gene from Bacillus |
| | | thuringiensis. |
| BT11 × MIR604 × GA21 | Syngenta Seeds, Inc. | Stacked insect resistant and herbicide tolerant |
| | | maize produced by conventional cross breeding of |
| | | parental lines BT11 (OECD unique identifier: SYN- |
| | | BTO11-1), MIR604 (OECD unique identifier: SYN- |
| | | IR6O5-5) and GA21 (OECD unique identifier: MON- |
| | | OOO21-9). Resistance to the European Corn Borer |
| | | and tolerance to the herbicide glufosinate |
| | | ammonium (Liberty) is derived from BT11, which |
| | | contains the Cry1Ab gene from Bacillus |
| | | thuringiensis subsp. kurstaki, and the |
| | | phosphinothricin N-acetyltransferase (PAT) |
| | | encoding gene from S. viridochromogenes. Corn |
| | | rootworm-resistance is derived from MIR604 which |
| | | contains the mCry3A gene from Bacillus |
| | | thuringiensis. Tolerance to glyphosate herbicide is |
| | | derived from GA21 which contains a a modified |
| | | EPSPS gene from maize. |
| DAS-59122-7 | DOW AgroSciences LLC | Corn rootworm-resistant maize produced by |
| | and Pioneer Hi-Bred | inserting the Cry34Ab1 and Cry35Ab1 genes from |
| | International Inc. | Bacillus thuringiensis strain PS149B1. The PAT |
| | | encoding gene from Streptomyces |
| | | viridochromogenes was introduced as a selectable |
| | | marker. |
| DAS-59122-7 × TC1507 × | DOW AgroSciences LLC | Stacked insect resistant and herbicide tolerant |
| NK603 | and Pioneer Hi-Bred | maize produced by conventional cross breeding of |
| | International Inc. | parental lines DAS-59122-7 (OECD unique |
| | | identifier: DAS-59122-7) and TC1507 (OECD unique |
| | | identifier: DAS-O15O7-1) with NK603 (OECD |
| | | unique identifier: MON-OO6O3-6). Corn rootworm- |
| | | resistance is derived from DAS-59122-7 which |
| | | contains the Cry34Ab1 and Cry35Ab1 genes from |
| | | Bacillus thuringiensis strain PS149B1. Lepidopteran |
| | | resistance and tolerance to glufosinate ammonium |
| | | herbicide is derived from TC1507. Tolerance to |
| | | glyphosate herbicide is derived from NK603. |
| DBT418 | Dekalb Genetics | Insect-resistant and glufosinate ammonium |
| | Corporation | herbicide tolerant maize developed by inserting |
| | | genes encoding Cry1AC protein from Bacillus |
| | | thuringiensis subsp kurstaki and phosphinothricin |
| | | acetyltransferase (PAT) from Streptomyces |
| | | hygroscopicus |
| MIR604 × GA21 | Syngenta Seeds, Inc. | Stacked insect resistant and herbicide tolerant |
| | | maize produced by conventional cross breeding of |
| | | parental lines MIR604 (OECD unique identifier: |
| | | SYN-IR6O5-5) and GA21 (OECD unique identifier: |
| | | MON-OOO21-9). Corn rootworm-resistance is |
| | | derived from MIR604 which contains the mCry3A |
| | | gene from Bacillus thuringiensis. Tolerance to |
| | | glyphosate herbicide is derived from GA21. |
| MON80100 | Monsanto Company | Insect-resistant maize produced by inserting the |
| | | Cry1Ab gene from Bacillus thuringiensis subsp. |
| | | kurstaki. The genetic modification affords resistance |
| | | to attack by the European corn borer (ECB). |
| MON802 | Monsanto Company | Insect-resistant and glyphosate herbicide tolerant |
| | | maize produced by inserting the genes encoding the |
| | | Cry1Ab protein from Bacillus thuringiensis and the |
| | | 5-enolpyruvylshikimate-3-phosphate synthase |
| | | (EPSPS) from A. tumefaciens strain CP4. |
| MON809 | Pioneer Hi-Bred | Resistance to European corn borer (Ostrinia |
| | International Inc. | nubilalis) by introduction of a synthetic Cry1Ab gene. |
| | | Glyphosate resistance via introduction of the |
| | | bacterial version of a plant enzyme, 5-enolpyruvyl |
| | | shikimate-3-phosphate synthase (EPSPS). |
| MON810 | Monsanto Company | Insect-resistant maize produced by inserting a |
| | | truncated form of the Cry1Ab gene from Bacillus |
| | | thuringiensis subsp. kurstaki HD-1. The genetic |
| | | modification affords resistance to attack by the |
| | | European corn borer (ECB). |
| MON810 × LY038 | Monsanto Company | Stacked insect resistant and enhanced lysine |
| | | content maize derived from conventional cross- |
| | | breeding of the parental lines MON810 (OECD |
| | | identifier: MON-OO81O-6) and LY038 (OECD |
| | | identifier: REN-OOO38-3). |
| MON810 × MON88017 | Monsanto Company | Stacked insect resistant and glyphosate tolerant |
| | | maize derived from conventional cross-breeding of |
| | | the parental lines MON810 (OECD identifier: MON- |
| | | OO81O-6) and MON88017 (OECD identifier: MON- |
| | | 88O17-3). European corn borer (ECB) resistance is |
| | | derived from a truncated form of the Cry1Ab gene |
| | | from Bacillus thuringiensis subsp. kurstaki HD-1 |
| | | present in MON810. Corn rootworm resistance is |
| | | derived from the Cry3Bb1 gene from Bacillus |
| | | thuringiensis subspecies kumamotoensis strain |
| | | EG4691 present in MON88017. Glyphosate |
| | | tolerance is derived from a 5-enolpyruvylshikimate- |
| | | 3-phosphate synthase (EPSPS) encoding gene from |
| | | Agrobacterium tumefaciens strain CP4 present in |
| | | MON88017. |
| MON832 | Monsanto Company | Introduction, by particle bombardment, of glyphosate |
| | | oxidase (GOX) and a modified 5-enolpyruvyl |
| | | shikimate-3-phosphate synthase (EPSPS), an |
| | | enzyme involved in the shikimate biochemical |
| | | pathway for the production of the aromatic amino |
| | | acids. |
| MON863 | Monsanto Company | Corn rootworm resistant maize produced by |
| | | inserting the Cry3Bb1 gene from Bacillus |
| | | thuringiensis subsp. kumamotoensis. |
| MON863 × MON810 | Monsanto Company | Stacked insect resistant corn hybrid derived from |
| | | conventional cross-breeding of the parental lines |
| | | MON863 (OECD identifier: MON-OO863-5) and |
| | | MON810 (OECD identifier: MON-OO81O-6) |
| MON863 × MON810 × | Monsanto Company | Stacked insect resistant and herbicide tolerant corn |
| NK603 | | hybrid derived from conventional cross-breeding of |
| | | the stacked hybrid MON-OO863-5 × MON-OO81O-6 |
| | | and NK603 (OECD identifier: MON-OO6O3-6). |
| MON863 × NK603 | Monsanto Company | Stacked insect resistant and herbicide tolerant corn |
| | | hybrid derived from conventional cross-breeding of |
| | | the parental lines MON863 (OECD identifier: MON- |
| | | OO863-5) and NK603 (OECD identifier: MON- |
| | | OO6O3-6). |
| MON87460 | Monsanto Company | MON 87460 was developed to provide reduced yield |
| | | loss under water-limited conditions compared to |
| | | conventional maize. Efficacy in MON 87460 is |
| | | derived by expression of the inserted Bacillus |
| | | subtilis cold shock protein B (CspB). |
| MON88017 | Monsanto Company | Corn rootworm-resistant maize produced by |
| | | inserting the Cry3Bb1 gene from Bacillus |
| | | thuringiensis subspecies kumamotoensis strain |
| | | EG4691. Glyphosate tolerance derived by inserting |
| | | a 5-enolpyruvylshikimate-3-phosphate synthase |
| | | (EPSPS) encoding gene from Agrobacterium |
| | | tumefaciens strain CP4. |
| MON89034 | Monsanto Company | Maize event expressing two different insecticidal |
| | | proteins from Bacillus thuringiensis providing |
| | | resistance to number of Lepidopteran pests. |
| MON89034 × MON88017 | Monsanto Company | Stacked insect resistant and glyphosate tolerant |
| | | maize derived from conventional cross-breeding of |
| | | the parental lines MON89034 (OECD identifier: |
| | | MON-89O34-3) and MON88017 (OECD |
| | | identifier: MON-88O17-3). Resistance to |
| | | Lepidopteran insects is derived from two Cry genes |
| | | present in MON89043. Corn rootworm resistance is |
| | | derived from a single Cry genes and glyphosate |
| | | tolerance is derived from the 5- |
| | | enolpyruvylshikimate-3-phosphate synthase |
| | | (EPSPS) encoding gene from Agrobacterium |
| | | tumefaciens present in MON88017. |
| MON89034 × NK603 | Monsanto Company | Stacked insect resistant and herbicide tolerant |
| | | maize produced by conventional cross breeding of |
| | | parental lines MON89034 (OECD identifier: MON- |
| | | 89O34-3) with NK603 (OECD unique identifier: |
| | | MON-OO6O3-6). Resistance to Lepidopteran |
| | | insects is derived from two Cry genes present in |
| | | MON89043. Tolerance to glyphosate herbicide is |
| | | derived from NK603. |
| NK603 × | Monsanto Company | Stacked insect resistant and herbicide tolerant corn hybrid |
| MON810 | | derived from conventional cross-breeding of the parental |
| | | lines NK603 (OECD identifier: MON-OO6O3-6) and |
| | | MON810 (OECD identifier: MON-OO81O-6). |
| MON89034 × | Monsanto Company and | Stacked insect resistant and herbicide tolerant maize |
| TC1507 × | Mycogen Seeds c/o Dow | produced by conventional cross breeding of parental lines: |
| MON88017 × | AgroSciences LLC | MON89034, TC1507, MON88017, and DAS-59122. |
| DAS-59122-7 | | Resistance to the above-ground and below-ground insect |
| | | pests and tolerance to glyphosate and glufosinate- |
| | | ammonium containing herbicides. |
| MS3 | Bayer CropScience | Male sterility caused by expression of the barnase |
| | (Aventis | ribonuclease gene from Bacillus amyloliquefaciens; PPT |
| | CropScience(AgrEvo)) | resistance was via PPT-acetyltransferase (PAT). |
| MS6 | Bayer CropScience | Male sterility caused by expression of the barnase |
| | (Aventis | ribonuclease gene from Bacillus amyloliquefaciens; PPT |
| | CropScience(AgrEvo)) | resistance was via PPT-acetyltransferase (PAT). |
| NK603 | Monsanto Company | Introduction, by particle bombardment, of a modified 5- |
| | | enolpyruvyl shikimate-3-phosphate synthase (EPSPS), an |
| | | enzyme involved in the shikimate biochemical pathway for |
| | | the production of the aromatic amino acids. |
| NK603 × T25 | Monsanto Company | Stacked glufosinate ammonium and glyphosate herbicide |
| | | tolerant maize hybrid derived from conventional cross- |
| | | breeding of the parental lines NK603 (OECD identifier: |
| | | MON-OO6O3-6) and T25 (OECD identifier: ACS-ZM003-2). |
| T25 × MON810 | Bayer CropScience | Stacked insect resistant and herbicide tolerant corn hybrid |
| | (Aventis | derived from conventional cross-breeding of the parental |
| | CropScience(AgrEvo)) | lines T25 (OECD identifier: ACS-ZMOO3-2) and MON810 |
| | | (OECD identifier: MON-OO81O-6). |
| TC1507 | Mycogen (c/o Dow | Insect-resistant and glufosinate ammonium herbicide |
| | AgroSciences); Pioneer (c/o | tolerant maize produced by inserting the Cry1F gene from |
| | DuPont) | Bacillus thuringiensis var. aizawai and the phosphinothricin |
| | | N-acetyltransferase encoding gene from Streptomyces |
| | | viridochromogenes. |
| TC1507 × | DOW AgroSciences LLC | Stacked insect resistant and herbicide tolerant corn hybrid |
| NK603 | | derived from conventional cross-breeding of the parental |
| | | lines 1507 (OECD identifier: DAS-O15O7-1) and NK603 |
| | | (OECD identifier: MON-OO6O3-6). |
| TC1507 × DAS- | DOW AgroSciences LLC | Stacked insect resistant and herbicide tolerant maize |
| 59122-7 | and Pioneer Hi-Bred | produced by conventional cross breeding of parental lines |
| | International Inc. | TC1507 (OECD unique identifier: DAS-O15O7-1) with DAS- |
| | | 59122-7 (OECD unique identifier: DAS-59122-7). |
| | | Resistance to Lepidopteran insects is derived from TC1507 |
| | | due the presence of the Cry1F gene from Bacillus |
| | | thuringiensis var. aizawai. Corn rootworm-resistance is |
| | | derived from DAS-59122-7 which contains the Cry34Ab1 |
| | | and Cry35Ab1 genes from Bacillus thuringiensis strain |
| | | PS149B1. Tolerance to glufosinate ammonium herbicide is |
| | | derived from TC1507 from the phosphinothricin N- |
| | | acetyltransferase encoding gene from Streptomyces |
| | | viridochromogenes. |

[0374] Other events with regulatory approval are well known to one skilled in the art and can be found at the Center for Environmental Risk Assessment (cera-gmc.org/?action=gm_crop database, which can be accessed using the www prefix) and at the International Service for the Acquisition of Agri-Biotech Applications (isaaa.org/gmapprovaldatabase/default.asp, which can be accessed using the www prefix).

### Gene Silencing

[0375] In some embodiments the stacked trait may be in the form of silencing of one or more polynucleotides of interest resulting in suppression of one or more target pest polypeptides. In some embodiments the silencing is achieved through the use of a suppression DNA construct.

[0376] In some embodiments one or more polynucleotide encoding the polypeptides of the PtIP-83 polypeptide or fragments or variants thereof may be stacked with one or more polynucleotides encoding one or more polypeptides having insecticidal activity or agronomic traits as set forth supra and optionally may further include one or more polynucleotides providing for gene silencing of one or more target polynucleotides as discussed infra.

[0377] “Suppression DNA construct” is a recombinant DNA construct which when transformed or stably integrated into the genome of the plant, results in “silencing” of a target gene in the plant. The target gene may be endogenous or transgenic to the plant. “Silencing,” as used herein with respect to the target gene, refers generally to the suppression of levels of mRNA or protein/enzyme expressed by the target gene, and/or the level of the enzyme activity or protein functionality. The term “suppression” includes lower, reduce, decline, decrease, inhibit, eliminate and prevent. “Silencing” or “gene silencing” does not specify mechanism and is inclusive, and not limited to, anti-sense, cosuppression, viral-suppression, hairpin suppression, stem-loop suppression, RNAi-based approaches and small RNA-based approaches.

[0378] A suppression DNA construct may comprise a region derived from a target gene of interest and may comprise all or part of the nucleic acid sequence of the sense strand (or antisense strand) of the target gene of interest. Depending upon the approach to be utilized, the region may be 100% identical or less than 100% identical (e.g., at least 50% or any integer between 51% and 100% identical) to all or part of the sense strand (or antisense strand) of the gene of interest.

[0379] Suppression DNA constructs are well-known in the art, are readily constructed once the target gene of interest is selected, and include, without limitation, cosuppression constructs, antisense constructs, viral-suppression constructs, hairpin suppression constructs, stem-loop suppression constructs, double-stranded RNA-producing constructs, and more generally, RNAi (RNA interference) constructs and small RNA constructs such as siRNA (short interfering RNA) constructs and miRNA (microRNA) constructs.

[0380] “Antisense inhibition” refers to the production of antisense RNA transcripts capable of suppressing the expression of the target protein.

[0381] “Antisense RNA” refers to an RNA transcript that is complementary to all or part of a target primary transcript or mRNA and that blocks the expression of a target isolated nucleic acid fragment (U.S. Pat. No. 5,107,065). The complementarity of an antisense RNA may be with any part of the specific gene transcript, i.e., at the 5′ non-coding sequence, 3′ non-coding sequence, introns or the coding sequence.

[0382] “Cosuppression” refers to the production of sense RNA transcripts capable of suppressing the expression of the target protein. “Sense” RNA refers to RNA transcript that includes the mRNA and can be translated into protein within a cell or in vitro. Cosuppression constructs in plants have been previously designed by focusing on overexpression of a nucleic acid sequence having homology to a native mRNA, in the sense orientation, which results in the reduction of all RNA having homology to the overexpressed sequence (see, Vaucheret, et al., (1998) Plant J. 16:651-659 and Gura, (2000) Nature 404:804-808).

[0383] Another variation describes the use of plant viral sequences to direct the suppression of proximal mRNA encoding sequences (PCT Publication WO 1998/36083).

[0384] Recent work has described the use of “hairpin” structures that incorporate all or part, of an mRNA encoding sequence in a complementary orientation that results in a potential “stem-loop” structure for the expressed RNA (PCT Publication WO 1999/53050). In this case the stem is formed by polynucleotides corresponding to the gene of interest inserted in either sense or anti-sense orientation with respect to the promoter and the loop is formed by some polynucleotides of the gene of interest, which do not have a complement in the construct. This increases the frequency of cosuppression or silencing in the recovered transgenic plants. For review of hairpin suppression, see, Wesley, et al., (2003) Methods in Molecular Biology, Plant Functional Genomics: Methods and Protocols 236:273-286.

[0385] A construct where the stem is formed by at least 30 nucleotides from a gene to be suppressed and the loop is formed by a random nucleotide sequence has also effectively been used for suppression (PCT Publication WO 1999/61632).

[0386] The use of poly-T and poly-A sequences to generate the stem in the stem-loop structure has also been described (PCT Publication WO 2002/00894).

[0387] Yet another variation includes using synthetic repeats to promote formation of a stem in the stem-loop structure. Transgenic organisms prepared with such recombinant DNA fragments have been shown to have reduced levels of the protein encoded by the nucleotide fragment forming the loop as described in PCT Publication WO 2002/00904.

[0388] RNA interference refers to the process of sequence-specific post-transcriptional gene silencing in animals mediated by short interfering RNAs (siRNAs) (Fire, et al., (1998) Nature 391:806). The corresponding process in plants is commonly referred to as post-transcriptional gene silencing (PTGS) or RNA silencing and is also referred to as quelling in fungi. The process of post-transcriptional gene silencing is thought to be an evolutionarily-conserved cellular defense mechanism used to prevent the expression of foreign genes and is commonly shared by diverse flora and phyla (Fire, et al., (1999) Trends Genet. 15:358). Such protection from foreign gene expression may have evolved in response to the production of double-stranded RNAs (dsRNAs) derived from viral infection or from the random integration of transposon elements into a host genome via a cellular response that specifically destroys homologous single-stranded RNA of viral genomic RNA. The presence of dsRNA in cells triggers the RNAi response through a mechanism that has yet to be fully characterized.

[0389] The presence of long dsRNAs in cells stimulates the activity of a ribonuclease Ill enzyme referred to as dicer. Dicer is involved in the processing of the dsRNA into short pieces of dsRNA known as short interfering RNAs (siRNAs) (Berstein, et al., (2001) Nature 409:363). Short interfering RNAs derived from dicer activity are typically about 21 to about 23 nucleotides in length and comprise about 19 base pair duplexes (Elbashir, et al., (2001) Genes Dev. 15:188). Dicer has also been implicated in the excision of 21- and 22-nucleotide small temporal RNAs (stRNAs) from precursor RNA of conserved structure that are implicated in translational control (Hutvagner, et al., (2001) Science 293:834). The RNAi response also features an endonuclease complex, commonly referred to as an RNA-induced silencing complex (RISC), which mediates cleavage of single-stranded RNA having sequence complementarity to the antisense strand of the siRNA duplex. Cleavage of the target RNA takes place in the middle of the region complementary to the antisense strand of the siRNA duplex (Elbashir, et al., (2001) Genes Dev. 15:188). In addition, RNA interference can also involve small RNA (e.g., miRNA) mediated gene silencing, presumably through cellular mechanisms that regulate chromatin structure and thereby prevent transcription of target gene sequences (see, e.g., Allshire, (2002) Science 297:1818-1819; Volpe, et al., (2002) Science 297:1833-1837; Jenuwein, (2002) Science 297:2215-2218 and Hall, et al., (2002) Science 297:2232-2237). As such, miRNA molecules of the disclosure can be used to mediate gene silencing via interaction with RNA transcripts or alternately by interaction with particular gene sequences, wherein such interaction results in gene silencing either at the transcriptional or post-transcriptional level.

[0390] Methods and compositions are further provided which allow for an increase in RNAi produced from the silencing element. In such embodiments, the methods and compositions employ a first polynucleotide comprising a silencing element for a target pest sequence operably linked to a promoter active in the plant cell; and, a second polynucleotide comprising a suppressor enhancer element comprising the target pest sequence or an active variant or fragment thereof operably linked to a promoter active in the plant cell. The combined expression of the silencing element with suppressor enhancer element leads to an increased amplification of the inhibitory RNA produced from the silencing element over that achievable with only the expression of the silencing element alone. In addition to the increased amplification of the specific RNAi species itself, the methods and compositions further allow for the production of a diverse population of RNAi species that can enhance the effectiveness of disrupting target gene expression. As such, when the suppressor enhancer element is expressed in a plant cell in combination with the silencing element, the methods and composition can allow for the systemic production of RNAi throughout the plant; the production of greater amounts of RNAi than would be observed with just the silencing element construct alone; and, the improved loading of RNAi into the phloem of the plant, thus providing better control of phloem feeding insects by an RNAi approach. Thus, the various methods and compositions provide improved methods for the delivery of inhibitory RNA to the target organism. See, for example, US Patent Application Publication 2009/0188008.

[0391] As used herein, a “suppressor enhancer element” comprises a polynucleotide comprising the target sequence to be suppressed or an active fragment or variant thereof. It is recognize that the suppressor enhancer element need not be identical to the target sequence, but rather, the suppressor enhancer element can comprise a variant of the target sequence, so long as the suppressor enhancer element has sufficient sequence identity to the target sequence to allow for an increased level of the RNAi produced by the silencing element over that achievable with only the expression of the silencing element. Similarly, the suppressor enhancer element can comprise a fragment of the target sequence, wherein the fragment is of sufficient length to allow for an increased level of the RNAi produced by the silencing element over that achievable with only the expression of the silencing element.

[0392] It is recognized that multiple suppressor enhancer elements from the same target sequence or from different target sequences or from different regions of the same target sequence can be employed. For example, the suppressor enhancer elements employed can comprise fragments of the target sequence derived from different region of the target sequence (i.e., from the 3′UTR, coding sequence, intron, and/or 5′UTR). Further, the suppressor enhancer element can be contained in an expression cassette, as described elsewhere herein, and in specific embodiments, the suppressor enhancer element is on the same or on a different DNA vector or construct as the silencing element. The suppressor enhancer element can be operably linked to a promoter as disclosed herein. It is recognized that the suppressor enhancer element can be expressed constitutively or alternatively, it may be produced in a stage-specific manner employing the various inducible or tissue-preferred or developmentally regulated promoters that are discussed elsewhere herein.

[0393] In specific embodiments, employing both a silencing element and the suppressor enhancer element the systemic production of RNAi occurs throughout the entire plant. In further embodiments, the plant or plant parts of the disclosure have an improved loading of RNAi into the phloem of the plant than would be observed with the expression of the silencing element construct alone and, thus provide better control of phloem feeding insects by an RNAi approach. In specific embodiments, the plants, plant parts and plant cells of the disclosure can further be characterized as allowing for the production of a diversity of RNAi species that can enhance the effectiveness of disrupting target gene expression.

[0394] In specific embodiments, the combined expression of the silencing element and the suppressor enhancer element increases the concentration of the inhibitory RNA in the plant cell, plant, plant part, plant tissue or phloem over the level that is achieved when the silencing element is expressed alone.

[0395] As used herein, an “increased level of inhibitory RNA” comprises any statistically significant increase in the level of RNAi produced in a plant having the combined expression when compared to an appropriate control plant. For example, an increase in the level of RNAi in the plant, plant part or the plant cell can comprise at least about a 1%, about a 1%-5%, about a 5%-10%, about a 10%-20%, about a 20%-30%, about a 30%-40%, about a 40%-50%, about a 50%-60%, about 60-70%, about 70%-80%, about a 80%-90%, about a 90%-100% or greater increase in the level of RNAi in the plant, plant part, plant cell or phloem when compared to an appropriate control. In other embodiments, the increase in the level of RNAi in the plant, plant part, plant cell or phloem can comprise at least about a 1 fold, about a 1 fold-5 fold, about a 5 fold-10 fold, about a 10 fold-20 fold, about a 20 fold-30 fold, about a 30 fold-40 fold, about a 40 fold-50 fold, about a 50 fold-60 fold, about 60 fold-70 fold, about 70 fold-80 fold, about a 80 fold-90 fold, about a 90 fold-100 fold or greater increase in the level of RNAi in the plant, plant part, plant cell or phloem when compared to an appropriate control. Examples of combined expression of the silencing element with suppressor enhancer element for the control of Stinkbugs and Lygus can be found in US Patent Application Publication 2011/0301223 and US Patent Application Publication 2009/0192117.

[0396] Some embodiments relate to down-regulation of expression of target genes in insect pest species by interfering ribonucleic acid (RNA) molecules. PCT Publication WO 2007/074405 describes methods of inhibiting expression of target genes in invertebrate pests including Colorado potato beetle. PCT Publication WO 2005/110068 describes methods of inhibiting expression of target genes in invertebrate pests including in particular Western corn rootworm as a means to control insect infestation. Furthermore, PCT Publication WO 2009/091864 describes compositions and methods for the suppression of target genes from insect pest species including pests from the Lygus genus. Nucleic acid molecules including RNAi for targeting the vacuolar ATPase H subunit, useful for controlling a coleopteran pest population and infestation as described in US Patent Application Publication 2012/0198586. PCT Publication WO 2012/055982 describes ribonucleic acid (RNA or double stranded RNA) that inhibits or down regulates the expression of a target gene that encodes: an insect ribosomal protein such as the ribosomal protein L19, the ribosomal protein L40 or the ribosomal protein S27A; an insect proteasome subunit such as the Rpn6 protein, the Pros 25, the Rpn2 protein, the proteasome beta 1 subunit protein or the Pros beta 2 protein; an insect β-coatomer of the COPI vesicle, the γ-coatomer of the COPI vesicle, the β′-coatomer protein or the ζ-coatomer of the COPI vesicle; an insect Tetraspanine 2 A protein which is a putative transmembrane domain protein; an insect protein belonging to the actin family such as Actin 5C; an insect ubiquitin-5E protein; an insect Sec23 protein which is a GTPase activator involved in intracellular protein transport; an insect crinkled protein which is an unconventional myosin which is involved in motor activity; an insect crooked neck protein which is involved in the regulation of nuclear alternative mRNA splicing; an insect vacuolar H+-ATPase G-subunit protein and an insect Tbp-1 such as Tat-binding protein. US Patent Application Publications 2012/029750, US 20120297501, and 2012/0322660 describe interfering ribonucleic acids (RNA or double stranded RNA) that functions upon uptake by an insect pest species to down-regulate expression of a target gene in said insect pest, wherein the RNA comprises at least one silencing element wherein the silencing element is a region of double-stranded RNA comprising annealed complementary strands, one strand of which comprises or consists of a sequence of nucleotides which is at least partially complementary to a target nucleotide sequence within the target gene. US Patent Application Publication 2012/0164205 describe potential targets for interfering double stranded ribonucleic acids for inhibiting invertebrate pests including: a Chd3 Homologous Sequence, a Beta-Tubulin Homologous Sequence, a 40 kDa V-ATPase Homologous Sequence, a EF1a Homologous Sequence, a 26S Proteosome Subunit p28 Homologous Sequence, a Juvenile Hormone Epoxide Hydrolase Homologous Sequence, a Swelling Dependent Chloride Channel Protein Homologous Sequence, a Glucose-6-Phosphate 1-Dehydrogenase Protein Homologous Sequence, an Act42A Protein Homologous Sequence, a ADP-Ribosylation Factor 1 Homologous Sequence, a Transcription Factor IIB Protein Homologous Sequence, a Chitinase Homologous Sequences, a Ubiquitin Conjugating Enzyme Homologous Sequence, a Glyceraldehyde-3-Phosphate Dehydrogenase Homologous Sequence, an Ubiquitin B Homologous Sequence, a Juvenile Hormone Esterase Homolog, and an Alpha Tubuliln Homologous Sequence.

### Use In Pesticidal Control

[0397] General methods for employing strains comprising a nucleic acid sequence of the embodiments or a variant thereof, in pesticide control or in engineering other organisms as pesticidal agents are known in the art. See, for example U.S. Pat. No. 5,039,523 and EP 0480762A2.

[0398] Microorganism hosts that are known to occupy the “phytosphere” (phylloplane, phyllosphere, rhizosphere, and/or rhizoplana) of one or more crops of interest may be selected. These microorganisms are selected so as to be capable of successfully competing in the particular environment with the wild-type microorganisms, provide for stable maintenance and expression of the gene expressing the PtIP-83 polypeptide and desirably provide for improved protection of the pesticide from environmental degradation and inactivation.

[0399] Such microorganisms include bacteria, algae, and fungi. Of particular interest are microorganisms such as bacteria, e.g., Pseudomonas, Erwinia, Serratia, Klebsiella, Xanthomonas, Streptomyces, Rhizobium, Rhodopseudomonas, Methylius, Agrobacterium, Acetobacter, Lactobacillus, Arthrobacter, Azotobacter, Leuconostoc, and Alcaligenes, fungi, particularly yeast, e.g., Saccharomyces, Cryptococcus, Kluyveromyces, Sporobolomyces, Rhodotorula, and Aureobasidium. Of particular interest are such phytosphere bacterial species as Pseudomonas syringae, Pseudomonas fluorescens, Pseudomonas chlororaphis, Serratia marcescens, Acetobacter xylinum, Agrobacteria, Rhodopseudomonas spheroides, Xanthomonas campestris, Rhizobium melioti, Alcaligenes entrophus, Clavibacter xyli and Azotobacter vinelandii and phytosphere yeast species such as Rhodotorula rubra, R. glutinis, R. marina, R. aurantiaca, Cryptococcus albidus, C. diffluens, C. laurentii, Saccharomyces rosei, S. pretoriensis, S. cerevisiae, Sporobolomyces roseus, S. odorus, Kluyveromyces veronae, and Aureobasidium pollulans. Of particular interest are the pigmented microorganisms. Host organisms of particular interest include yeast, such as Rhodotorula spp., Aureobasidium spp., Saccharomyces spp. (such as S. cerevisiae), Sporobolomyces spp., phylloplane organisms such as Pseudomonas spp. (such as P. aeruginosa, P. fluorescens, P. chlororaphis), Erwinia spp., and Flavobacterium spp., and other such organisms, including Agrobacterium tumefaciens, E. coli, Bacillus subtilis, Bacillus cereus and the like.

[0400] Genes encoding the PtIP-83 polypeptide of the embodiments can be introduced into microorganisms that multiply on plants (epiphytes) to deliver PtIP-83 polypeptide to potential target pests. Epiphytes, for example, can be gram-positive or gram-negative bacteria.

[0401] Root-colonizing bacteria, for example, can be isolated from the plant of interest by methods known in the art. Specifically, a Bacillus cereus strain that colonizes roots can be isolated from roots of a plant (see, for example, Handelsman et al. (1991) Appl. Environ. Microbiol. 56:713-718). Genes encoding the PtIP-83 polypeptide of the embodiments can be introduced into a root-colonizing Bacillus cereus by standard methods known in the art.

[0402] Genes encoding PtIP-83 polypeptides can be introduced, for example, into the root-colonizing Bacillus by means of electro transformation. Specifically, genes encoding the PtIP-83 polypeptides can be cloned into a shuttle vector, for example, pHT3101 (Lerecius, et al., (1989) FEMS Microbiol. Letts. 60:211-218. The shuttle vector pHT3101 containing the coding sequence for the particular PtIP-83 polypeptide gene can, for example, be transformed into the root-colonizing Bacillus by means of electroporation (Lerecius, et al., (1989) FEMS Microbiol. Letts. 60:211-218).

[0403] Expression systems can be designed so that PtIP-83 polypeptides are secreted outside the cytoplasm of gram-negative bacteria, such as E. coli, for example. Advantages of having a PtIP-83 polypeptide secreted are: (1) avoidance of potential cytotoxic effects of the PtIP-83 polypeptide expressed; and (2) improvement in the efficiency of purification of the PtIP-83 polypeptide, including, but not limited to, increased efficiency in the recovery and purification of the protein per volume cell broth and decreased time and/or costs of recovery and purification per unit protein.

[0404] PtIP-83 polypeptides can be made to be secreted in E. coli, for example, by fusing an appropriate E. coli signal peptide to the amino-terminal end of the PtIP-83 polypeptide. Signal peptides recognized by E. coli can be found in proteins already known to be secreted in E. coli, for example the OmpA protein (Ghrayeb, et al., (1984) EMBO J, 3:2437-2442). OmpA is a major protein of the E. coli outer membrane, and thus its signal peptide is thought to be efficient in the translocation process. Also, the OmpA signal peptide does not need to be modified before processing as may be the case for other signal peptides, for example lipoprotein signal peptide (Duffaud, et al., (1987) Meth. Enzymol. 153:492).

[0405] PtIP-83 polypeptides of the embodiments can be fermented in a bacterial host and the resulting bacteria processed and used as a microbial spray in the same manner that Bt strains have been used as insecticidal sprays. In the case of a PtIP-83 polypeptide(sthat is secreted from Bacillus, the secretion signal is removed or mutated using procedures known in the art. Such mutations and/or deletions prevent secretion of the PtIP-83 polypeptide(s) into the growth medium during the fermentation process. The PtIP-83 polypeptide is retained within the cell, and the cells are then processed to yield the encapsulated PtIP-83 polypeptide. Any suitable microorganism can be used for this purpose. Pseudomonas has been used to express Bt toxins as encapsulated proteins and the resulting cells processed and sprayed as an insecticide (Gaertner, et al., (1993), in: Advanced Engineered Pesticides, ed. Kim).

[0406] Alternatively, the PtIP-83 polypeptide is produced by introducing a heterologous gene into a cellular host. Expression of the heterologous gene results, directly or indirectly, in the intracellular production and maintenance of the pesticide. These cells are then treated under conditions that prolong the activity of the toxin produced in the cell when the cell is applied to the environment of target pest(s). The resulting product retains the toxicity of the toxin. These naturally encapsulated PtIP-83 polypeptide may then be formulated in accordance with conventional techniques for application to the environment hosting a target pest, e.g., soil, water, and foliage of plants. See, for example EPA 0192319, and the references cited therein.

### Pesticidal Compositions

[0407] In some embodiments the active ingredients can be applied in the form of compositions and can be applied to the crop area or plant to be treated, simultaneously or in succession, with other compounds. These compounds can be fertilizers, weed killers, Cryoprotectants, surfactants, detergents, pesticidal soaps, dormant oils, polymers, and/or time-release or biodegradable carrier formulations that permit long-term dosing of a target area following a single application of the formulation. They can also be selective herbicides, chemical insecticides, virucides, microbicides, amoebicides, pesticides, fungicides, bacteriocides, nematocides, molluscicides or mixtures of several of these preparations, if desired, together with further agriculturally acceptable carriers, surfactants or application-promoting adjuvants customarily employed in the art of formulation. Suitable carriers and adjuvants can be solid or liquid and correspond to the substances ordinarily employed in formulation technology, e.g. natural or regenerated mineral substances, solvents, dispersants, wetting agents, tackifiers, binders or fertilizers. Likewise the formulations may be prepared into edible “baits” or fashioned into pest “traps” to perm it feeding or ingestion by a target pest of the pesticidal formulation.

[0408] Methods of applying an active ingredient or an agrochemical composition that contains at least one of the PtIP-83 polypeptide produced by the bacterial strains include leaf application, seed coating and soil application. The number of applications and the rate of application depend on the intensity of infestation by the corresponding pest.

[0409] The composition may be formulated as a powder, dust, pellet, granule, spray, emulsion, colloid, solution or such like, and may be prepared by such conventional means as desiccation, lyophilization, homogenation, extraction, filtration, centrifugation, sedimentation or concentration of a culture of cells comprising the polypeptide. In all such compositions that contain at least one such pesticidal polypeptide, the polypeptide may be present in a concentration of from about 1% to about 99% by weight.

[0410] Lepidopteran, Dipteran, Heteropteran, nematode, Hemiptera or Coleopteran pests may be killed or reduced in numbers in a given area by the methods of the disclosure or may be prophylactically applied to an environmental area to prevent infestation by a susceptible pest. Preferably the pest ingests or is contacted with, a pesticidally-effective amount of the polypeptide. “Pesticidally-effective amount” as used herein refers to an amount of the pesticide that is able to bring about death to at least one pest or to noticeably reduce pest growth, feeding or normal physiological development. This amount will vary depending on such factors as, for example, the specific target pests to be controlled, the specific environment, location, plant, crop or agricultural site to be treated, the environmental conditions and the method, rate, concentration, stability, and quantity of application of the pesticidally-effective polypeptide composition. The formulations may also vary with respect to climatic conditions, environmental considerations, and/or frequency of application and/or severity of pest infestation.

[0411] The pesticide compositions described may be made by formulating either the bacterial cell, Crystal and/or spore suspension or isolated protein component with the desired agriculturally-acceptable carrier. The compositions may be formulated prior to administration in an appropriate means such as lyophilized, freeze-dried, desiccated or in an aqueous carrier, medium or suitable diluent, such as saline or other buffer. The formulated compositions may be in the form of a dust or granular material or a suspension in oil (vegetable or mineral) or water or oil/water emulsions or as a wettable powder or in combination with any other carrier material suitable for agricultural application. Suitable agricultural carriers can be solid or liquid and are well known in the art. The term “agriculturally-acceptable carrier” covers all adjuvants, inert components, dispersants, surfactants, tackifiers, binders, etc. that are ordinarily used in pesticide formulation technology; these are well known to those skilled in pesticide formulation. The formulations may be mixed with one or more solid or liquid adjuvants and prepared by various means, e.g., by homogeneously mixing, blending and/or grinding the pesticidal composition with suitable adjuvants using conventional formulation techniques. Suitable formulations and application methods are described in U.S. Pat. No. 6,468,523, herein incorporated by reference. The plants can also be treated with one or more chemical compositions, including one or more herbicide, insecticides or fungicides. Exemplary chemical compositions include: Fruits/Vegetables Herbicides: Atrazine, Bromacil, Diuron, Glyphosate, Linuron, Metribuzin, Simazine, Trifluralin, Fluazifop, Glufosinate, Halo sulfuron Gowan, Paraquat, Propyzamide, Sethoxydim, Butafenacil, Halosulfuron, Indaziflam; Fruits/Vegetables Insecticides: Aldicarb, Bacillus thuriengiensis, Carbaryl, Carbofuran, Chlorpyrifos, Cypermethrin, Deltamethrin, Diazinon, Malathion, Abamectin, Cyfluthrin/beta-cyfluthrin, Esfenvalerate, Lambda-cyhalothrin, Acequinocyl, Bifenazate, Methoxyfenozide, Novaluron, Chromafenozide, Thiacloprid, Dinotefuran, FluaCrypyrim, Tolfenpyrad, Clothianidin, Spirodiclofen, Gamma-cyhalothrin, Spiromesifen, Spinosad, Rynaxypyr, Cyazypyr, Spinoteram, Triflumuron, Spirotetramat, Imidacloprid, Flubendiamide, Thiodicarb, Metaflumizone, Sulfoxaflor, Cyflumetofen, Cyanopyrafen, Imidacloprid, Clothianidin, Thiamethoxam, Spinotoram, Thiodicarb, Flonicamid, Methiocarb, Emamectin-benzoate, Indoxacarb, Forthiazate, Fenamiphos, Cadusaphos, Pyriproxifen, Fenbutatin-oxid, Hexthiazox, Methomyl, 4-[[(6-Chlorpyridin-3-yl)methyl](2,2-difluorethyl)amino]furan-2(5H)-on; Fruits/Vegetables Fungicides: Carbendazim, Chlorothalonil, EBDCs, Sulphur, Thiophanate-methyl, Azoxystrobin, Cymoxanil, Fluazinam, Fosetyl, Iprodione, Kresoxim-methyl, Metalaxyl/mefenoxam, Trifloxystrobin, Ethaboxam, lprovalicarb, Trifloxystrobin, Fenhexamid, Oxpoconazole fumarate, Cyazofamid, Fenamidone, Zoxamide, Picoxystrobin, Pyraclostrobin, Cyflufenamid, Boscalid; Cereals Herbicides: Isoproturon, Bromoxynil, loxynil, Phenoxies, Chlorsulfuron, Clodinafop, Diclofop, Diflufenican, Fenoxaprop, Florasulam, Fluoroxypyr, Metsulfuron, Triasulfuron, Flucarbazone, lodosulfuron, Propoxycarbazone, Picolinafen, Mesosulfuron, Beflubutamid, Pinoxaden, Amidosulfuron, Thifensulfuron Methyl, Tribenuron, Flupyrsulfuron, Sulfosulfuron, Pyrasulfotole, Pyroxsulam, Flufenacet, Tralkoxydim, Pyroxasulfon; Cereals Fungicides: Carbendazim, Chlorothalonil, Azoxystrobin, Cyproconazole, Cyprodinil, Fenpropimorph, Epoxiconazole, Kresoxim-methyl, Quinoxyfen, Tebuconazole, Trifloxystrobin, Simeconazole, Picoxystrobin, Pyraclostrobin, Dimoxystrobin, Prothioconazole, Fluoxastrobin; Cereals Insecticides: Dimethoate, Lambda-cyhalthrin, Deltamethrin, alpha-Cypermethrin, p-cyfluthrin, Bifenthrin, Imidacloprid, Clothianidin, Thiamethoxam, Thiacloprid, Acetamiprid, Dinetofuran, Clorphyriphos, Metamidophos, Oxidemethon-methyl, Pirimicarb, Methiocarb; Maize Herbicides: Atrazine, Alachlor, Bromoxynil, Acetochlor, Dicamba, Clopyralid, (S-) Dimethenamid, Glufosinate, Glyphosate, Isoxaflutole, (S-)Metolachlor, Mesotrione, Nicosulfuron, Primisulfuron, Rimsulfuron, Sulcotrione, Foramsulfuron, Topramezone, Tembotrione, Saflufenacil, Thiencarbazone, Flufenacet, Pyroxasulfon; Maize Insecticides: Carbofuran, Chlorpyrifos, Bifenthrin, Fipronil, Imidacloprid, Lambda-Cyhalothrin, Tefluthrin, Terbufos, Thiamethoxam, Clothianidin, Spiromesifen, Flubendiamide, Triflumuron, Rynaxypyr, Deltamethrin, Thiodicarb, p-Cyfluthrin, Cypermethrin, Bifenthrin, Lufenuron, Triflumoron, Tefluthrin,Tebupirimphos, Ethiprole, Cyazypyr, Thiacloprid, Acetamiprid, Dinetofuran, Avermectin, Methiocarb, Spirodiclofen, Spirotetramat; Maize Fungicides: Fenitropan, Thiram, Prothioconazole, Tebuconazole, Trifloxystrobin; Rice Herbicides: Butachlor, Propanil, Azimsulfuron, Bensulfuron, Cyhalofop, Daimuron, Fentrazamide, Imazosulfuron, Mefenacet, Oxaziclomefone, Pyrazosulfuron, Pyributicarb, Quinclorac, Thiobencarb, Indanofan, Flufenacet, Fentrazamide, Halosulfuron, Oxaziclomefone, Benzobicyclon, Pyriftalid, Penoxsulam, Bispyribac, Oxadiargyl, Ethoxysulfuron, Pretilachlor, Mesotrione, Tefuryltrione, Oxadiazone, Fenoxaprop, Pyrimisulfan; Rice Insecticides: Diazinon, Fenitrothion, Fenobucarb, Monocrotophos, Benfuracarb, Buprofezin, Dinotefuran, Fipronil, Imidacloprid, Isoprocarb, Thiacloprid, Chromafenozide, Thiacloprid, Dinotefuran, Clothianidin, Ethiprole, Flubendiamide, Rynaxypyr, Deltamethrin, Acetamiprid, Thiamethoxam, Cyazypyr, Spinosad, Spinotoram, Emamectin-Benzoate, Cypermethrin, Chlorpyriphos, Cartap, Methamidophos, Etofenprox, Triazophos, 4-[[(6-Chlorpyridin-3-yl)methyl](2,2-difluorethyl)amino]furan-2(5H)-on, Carbofuran, Benfuracarb; Rice Fungicides: Thiophanate-methyl, Azoxystrobin, Carpropamid, Edifenphos, Ferimzone, Iprobenfos, Isoprothiolane, Pencycuron, Probenazole, Pyroquilon, Tricyclazole, Trifloxystrobin, Diclocymet, Fenoxanil, Simeconazole, Tiadinil; Cotton Herbicides: Diuron, Fluometuron, MSMA, Oxyfluorfen, Prometryn, Trifluralin, Carfentrazone, Clethodim, Fluazifop-butyl, Glyphosate, Norflurazon, Pendimethalin, Pyrithiobac-sodium, Trifloxysulfuron, Tepraloxydim, Glufosinate, Flumioxazin, Thidiazuron; Cotton Insecticides: Acephate, Aldicarb, Chlorpyrifos, Cypermethrin, Deltamethrin, Malathion, Monocrotophos, Abamectin, Acetamiprid, Emamectin Benzoate, Imidacloprid, Indoxacarb, Lambda-Cyhalothrin, Spinosad, Thiodicarb, Gamma-Cyhalothrin, Spiromesifen, Pyridalyl, Flonicamid, Flubendiamide, Triflumuron, Rynaxypyr, Beta-Cyfluthrin, Spirotetramat, Clothianidin, Thiamethoxam, Thiacloprid, Dinetofuran, Flubendiamide, Cyazypyr, Spinosad, Spinotoram, gamma Cyhalothrin, 4-[[(6-Chlorpyridin-3-yl)methyl](2,2-difluorethyl)amino]furan-2(5H)-on, Thiodicarb, Avermectin, Flonicamid, Pyridalyl, Spiromesifen, Sulfoxaflor, Profenophos, Thriazophos, Endosulfan; Cotton Fungicides: Etridiazole, Metalaxyl, Quintozene; Soybean Herbicides: Alachlor, Bentazone, Trifluralin, Chlorimuron-Ethyl, Cloransulam-Methyl, Fenoxaprop, Fomesafen, Fluazifop, Glyphosate, Imazamox, Imazaquin, Imazethapyr, (S-)Metolachlor, Metribuzin, Pendimethalin, Tepraloxydim, Glufosinate; Soybean Insecticides: Lambda-cyhalothrin, Methomyl, Parathion, Thiocarb, Imidacloprid, Clothianidin, Thiamethoxam, Thiacloprid, Acetamiprid, Dinetofuran, Flubendiamide, Rynaxypyr, Cyazypyr, Spinosad, Spinotoram, Emamectin-Benzoate, Fipronil, Ethiprole, Deltamethrin, p-Cyfluthrin, gamma and lambda Cyhalothrin, 4-[[(6-Chlorpyridin-3-yl)methyl](2,2-difluorethyl)amino]furan-2(5H)-on, Spirotetramat, Spinodiclofen, Triflumuron, Flonicamid, Thiodicarb, beta-Cyfluthrin; Soybean Fungicides: Azoxystrobin, Cyproconazole, Epoxiconazole, Flutriafol, Pyraclostrobin, Tebuconazole, Trifloxystrobin, Prothioconazole, Tetraconazole; Sugarbeet Herbicides: Chloridazon, Desmedipham, Ethofumesate, Phenmedipham, Triallate, Clopyralid, Fluazifop, Lenacil, Metamitron, Quinmerac, Cycloxydim, Triflusulfuron, Tepraloxydim, Quizalofop; Sugarbeet Insecticides: Imidacloprid, Clothianidin, Thiamethoxam, Thiacloprid, Acetamiprid, Dinetofuran, Deltamethrin, p-Cyfluthrin, gamma/lambda Cyhalothrin, 4-[[(6-Chlorpyridin-3-yl)methyl](2,2-difluorethyl)amino]furan-2(5H)-on, Tefluthrin, Rynaxypyr, Cyaxypyr, Fipronil, Carbofuran; Canola Herbicides: Clopyralid, Diclofop, Fluazifop, Glufosinate, Glyphosate, Metazachlor, Trifluralin Ethametsulfuron, Quinmerac, Quizalofop, Clethodim, Tepraloxydim; Canola Fungicides: Azoxystrobin, Carbendazim, Fludioxonil, Iprodione, Prochloraz, Vinclozolin; Canola Insecticides: Carbofuran organophosphates, Pyrethroids, Thiacloprid, Deltamethrin, Imidacloprid, Clothianidin, Thiamethoxam, Acetamiprid, Dinetofuran, p-Cyfluthrin, gamma and lambda Cyhalothrin, tau-Fluvaleriate, Ethiprole, Spinosad, Spinotoram, Flubendiamide, Rynaxypyr, Cyazypyr, 4-[[(6-Chlorpyridin-3-yl)methyl](2,2-difluorethyl)amino]furan-2(5H)-on.

[0412] In some embodiments the herbicide is Atrazine, Bromacil, Diuron, Chlorsulfuron, Metsulfuron, Thifensulfuron Methyl, Tribenuron, Acetochlor, Dicamba, Isoxaflutole, Nicosulfuron, Rimsulfuron, Pyrithiobac-sodium, Flumioxazin, Chlorimuron-Ethyl, Metribuzin, Quizalofop, S-metolachlor, Hexazinne or combinations thereof.

[0413] In some embodiments the insecticide is Esfenvalerate, Chlorantraniliprole, Methomyl, Indoxacarb, Oxamyl or combinations thereof.

### Pesticidal and Insecticidal Activity

[0414] “Pest” includes but is not limited to, insects, fungi, bacteria, nematodes, mites, ticks and the like. Insect pests include insects selected from the orders Coleoptera, Diptera, Hymenoptera, Lepidoptera, Mallophaga, Homoptera, Hemiptera Orthroptera, Thysanoptera, Dermaptera, Isoptera, Anoplura, Siphonaptera, Trichoptera, etc., particularly Lepidoptera and Coleoptera.

[0415] Those skilled in the art will recognize that not all compounds are equally effective against all pests. Compounds of the embodiments display activity against insect pests, which may include economically important agronomic, forest, greenhouse, nursery omamentals, food and fiber, public and animal health, domestic and commercial structure, household and stored product pests.

[0416] Larvae of the order Lepidoptera include, but are not limited to, armyworms, cutworms, loopers and heliothines in the family Noctuidae Spodoptera frugiperda JE Smith (fall armyworm); S. exigua Hübner (beet armyworm); S. litura Fabricius (tobacco cutworm, cluster caterpillar); Mamestra configurata Walker (bertha armyworm); M. brassicae Linnaeus (cabbage moth); Agrotis ipsilon Hufnagel (black cutworm); A. orthogonia Morrison (western cutworm); A. subterranea Fabricius (granulate cutworm); Alabama argillacea Hübner (cotton leaf worm); Trichoplusia ni Hübner (cabbage looper); Pseudoplusia includens Walker (soybean looper); Anticarsia gemmatalis Hübner (velvetbean caterpillar); Hypena scabra Fabricius (green cloverworm); Heliothis virescens Fabricius (tobacco budworm); Pseudaletia unipuncta Haworth (armyworm); Athetis mindara Barnes and Mcdunnough (rough skinned cutworm); Euxoa messoria Harris (darksided cutworm); Earias insulana Boisduval (spiny bollworm); E. vittella Fabricius (spotted bollworm); Helicoverpa armigera Hübner (American bollworm); H. zea Boddie (corn earworm or cotton bollworm); Melanchra picta Harris (zebra caterpillar); Egira (Xylomyges) curialis Grote (citrus cutworm); borers, casebearers, webworms, coneworms, and skeletonizers from the family Pyralidae Ostrinia nubilalis Hübner (European corn borer); Amyelois transitella Walker (naval orangeworm); Anagasta kuehniella Zeller (Mediterranean flour moth); Cadra cautella Walker (almond moth); Chilo suppressalis Walker (rice stem borer); C. partellus, (sorghum borer); Corcyra cephalonica Stainton (rice moth); Crambus caliginosellus Clemens (coin root webworm); C. teterrellus Zincken (bluegrass webworm); Cnaphalocrocis medinalis Guenée (rice leaf roller); Desmia funeralis Hübner (grape leaffolder); Diaphania hyalinata Linnaeus (melon worm); D. nitidalis Stoll (pickleworm); Diatraea grandiosella Dyar (southwestern corn borer), D. saccharalis Fabricius (surgarcane borer); Eoreuma loftini Dyar (Mexican rice borer); Ephestia elutella Hübner (tobacco (cacao) moth); Galleria mellonella Linnaeus (greater wax moth); Herpetogramma licarsisalis Walker (sod webworm); Homoeosoma electellum Hulst (sunflower moth); Elasmopalpus lignosellus Zeller (lesser cornstalk borer); Achroia grisella Fabricius (lesser wax moth); Loxostege sticticalis Linnaeus (beet webworm); Orthaga thyrisalis Walker (tea tree web moth); Maruca testulalis Geyer (bean pod borer); Plodia interpunctella Hübner (Indian meal moth); Scirpophaga incertulas Walker (yellow stem borer); Udea rubigalis Guenée (celery leaftier); and leafrollers, budworms, seed worms and fruit worms in the family Tortricidae Acleris gloverana Walsingham (Western blackheaded budworm); A. variana Fernald (Eastern blackheaded budworm); Archips argyrospila Walker (fruit tree leaf roller); A. rosana Linnaeus (European leaf roller); and other Archips species, Adoxophyes orana Fischer von Rösslerstamm (summer fruit tortrix moth); Cochylis hospes Walsingham (banded sunflower moth); Cydia latiferreana Walsingham (filbertworm); C. pomonella Linnaeus (coding moth); Platynota flavedana Clemens (variegated leafroller); P. stultana Walsingham (omnivorous leafroller); Lobesia botrana Denis & Schiffermüller (European grape vine moth); Spilonota ocellana Denis & Schiffermuller (eyespotted bud moth); Endopiza viteana Clemens (grape berry moth); Eupoecilia ambiguella Hübner (vine moth); Bonagota salubricola Meyrick (Brazilian apple leafroller); Grapholita molesta Busck (oriental fruit moth); Suleima helianthana Riley (sunflower bud moth); Argyrotaenia spp.; Choristoneura spp.

[0417] Selected other agronomic pests in the order Lepidoptera include, but are not limited to, Alsophila pometaria Harris (fall cankerworm); Anarsia lineatella Zeller (peach twig borer); Anisota senatoria J. E. Smith (orange striped oakworm); Antheraea pernyi Guérin-Méneville (Chinese Oak Tussah Moth); Bombyx mori Linnaeus (Silkworm); Bucculatrix thurberiella Busck (cotton leaf perforator); Colias eurytheme Boisduval (alfalfa caterpillar); Datana integerrima Grote & Robinson (walnut caterpillar); Dendrolimus sibiricus Tschetwerikov (Siberian silk moth), Ennomos subsignaria Hübner (elm spanworm); Erannis tiliaria Harris (linden looper); Euproctis chrysorrhoea Linnaeus (browntail moth); Harrisina americana Guérin-Méneville (grapeleaf skeletonizer); Hemileuca oliviae Cockrell (range caterpillar); Hyphantria cunea Drury (fall webworm); Keiferia lycopersicella Walsingham (tomato pinworm); Lambdina fiscellaria fiscellaria Hulst (Eastem hemlock looper); L. fiscellaria lugubrosa Hulst (Western hemlock looper); Leucoma salicis Linnaeus (satin moth); Lymantria dispar Linnaeus (gypsy moth); Manduca quinquemaculata Haworth (five spotted hawk moth, tomato hornworm); M. sexta Haworth (tomato hornworm, tobacco hornworm); Operophtera brumata Linnaeus (winter moth); Paleacrita vernata Peck (spring cankerworm); Papilio cresphontes Cramer (giant swallowtail orange dog); Phryganidia californica Packard (California oakworm); Phyllocnistis citrella Stainton (citrus leafminer); Phyllonorycter blancardella Fabricius (spotted tentiform leafminer); Pieris brassicae Linnaeus (large white butterfly); P. rapae Linnaeus (small white butterfly); P. napi Linnaeus (green veined white butterfly); Platyptilia carduidactyla Riley (artichoke plume moth); Plutella xylostella Linnaeus (diamondback moth); Pectinophora gossypiella Saunders (pink bollworm); Pontia protodice Boisduval and Leconte (Southem cabbageworm); Sabulodes aegrotata Guenée (omnivorous looper); Schizura concinna J. E. Smith (red humped caterpillar); Sitotroga cerealella Olivier (Angoumois grain moth); Thaumetopoea pityocampa Schiffermuller (pine processionary caterpillar); Tineola bisselliella Hummel (webbing clothesmoth); Tuta absoluta Meyrick (tomato leafminer); Yponomeuta padella Linnaeus (ermine moth); Heliothis subflexa Guenée; Malacosoma spp. and Orgyia spp.

[0418] Of interest are larvae and adults of the order Coleoptera including weevils from the families Anthribidae, Bruchidae and Curculionidae (including, but not limited to: Anthonomus grandis Boheman (boll weevil); Lissorhoptrus oryzophilus Kuschel (rice water weevil); Sitophilus granarius Linnaeus (granary weevil); S. oryzae Linnaeus (rice weevil); Hypera punctata Fabricius (clover leaf weevil); Cylindrocopturus adspersus LeConte (sunflower stem weevil); Smicronyx fulvus LeConte (red sunflower seed weevil); S. sordidus LeConte (gray sunflower seed weevil); Sphenophorus maidis Chittenden (maize billbug)); flea beetles, cucumber beetles, rootworms, leaf beetles, potato beetles and leafminers in the family Chrysomelidae (including, but not limited to: Leptinotarsa decemlineata Say (Colorado potato beetle); Diabrotica virgifera virgifera LeConte (western corn rootworm); D. barberi Smith and Lawrence (northern corn rootworm); D. undecimpunctata howardi Barber (southern corn rootworm); Chaetocnema pulicaria Melsheimer (corn flea beetle); Phyllotreta cruciferae Goeze (Crucifer flea beetle); Phyllotreta striolata (stripped flea beetle); Colaspis brunnea Fabricius (grape colaspis); Oulema melanopus Linnaeus (cereal leaf beetle); Zygogramma exclamationis Fabricius (sunflower beetle)); beetles from the family Coccinellidae (including, but not limited to: Epilachna varivestis Mulsant (Mexican bean beetle)); chafers and other beetles from the family Scarabaeidae (including, but not limited to: Popillia japonica Newman (Japanese beetle); Cyclocephala borealis Arrow (northern masked chafer, white grub); C. immaculata Olivier (southern masked chafer, white grub); Rhizotrogus majalis Razoumowsky (European chafer); Phyllophaga crinita Burmeister (white grub); Ligyrus gibbosus De Geer (carrot beetle)); carpet beetles from the family Dermestidae; wireworms from the family Elateridae, Eleodes spp., Melanotus spp.; Conoderus spp.; Limonius spp.; Agriotes spp.; Ctenicera spp.; Aeolus spp.; bark beetles from the family Scolytidae and beetles from the family Tenebrionidae.

[0419] Adults and immatures of the order Diptera are of interest, including leafminers Agromyza parvicornis Loew (corn blotch leafminer); midges (including, but not limited to: Contarinia sorghicola Coquillett (sorghum midge); Mayetiola destructor Say (Hessian fly); Sitodiplosis mosellana Géhin (wheat midge); Neolasioptera murtfeldtiana Felt, (sunflower seed midge)); fruit flies (Tephritidae), Oscinella frit Linnaeus (fruit flies); maggots (including, but not limited to: Delia platura Meigen (seedcorn maggot); D. coarctata Fallen (wheat bulb fly) and other Delia spp., Meromyza americana Fitch (wheat stem maggot); Musca domestica Linnaeus (house flies); Fannia canicularis Linnaeus, F. femoralis Stein (lesser house flies); Stomoxys calcitrans Linnaeus (stable flies)); face flies, horn flies, blow flies, Chrysomya spp.; Phormia spp. and other muscoid fly pests, horse flies Tabanus spp.; bot flies Gastrophilus spp.; Oestrus spp.; cattle grubs Hypoderma spp.; deer flies Chrysops spp.; Melophagus ovinus Linnaeus (keds) and other Brachycera, mosquitoes Aedes spp.; Anopheles spp.; Culex spp.; black flies Prosimulium spp.; Simulium spp.; biting midges, sand flies, sciarids, and other Nematocera.

[0420] Included as insects of interest are adults and nymphs of the orders Hemiptera and Homoptera such as, but not limited to, adelgids from the family Adelgidae, plant bugs from the family Miridae, cicadas from the family Cicadidae, leafhoppers, Empoasca spp.; from the family Cicadellidae, planthoppers from the families Cixiidae, Flatidae, Fulgoroidea, Issidae and Delphacidae, treehoppers from the family Membracidae, psyllids from the family Psyllidae, whiteflies from the family Aleyrodidae, aphids from the family Aphididae, phylloxera from the family Phylloxeridae, mealybugs from the family Pseudococcidae, scales from the families Asterolecanidae, Coccidae, Dactylopiidae, Diaspididae, Eriococcidae Ortheziidae, Phoenicococcidae and Margarodidae, lace bugs from the family Tingidae, stink bugs from the family Pentatomidae, cinch bugs, Blissus spp.; and other seed bugs from the family Lygaeidae, spittlebugs from the family Cercopidae squash bugs from the family Coreidae and red bugs and cotton stainers from the family Pyrrhocoridae.

[0421] Agronomically important members from the order Homoptera further include, but are not limited to: Acyrthisiphon pisum Harris (pea aphid); Aphis craccivora Koch (cowpea aphid); A. fabae Scopoli (black bean aphid); A. gossypii Glover (cotton aphid, melon aphid); A. maidiradicis Forbes (corn root aphid); A. pomi De Geer (apple aphid); A. spiraecola Patch (spirea aphid); Aulacorthum solani Kaltenbach (foxglove aphid); Chaetosiphon fragaefolii Cockerell (strawberry aphid); Diuraphis noxia Kurdjumov/Mordvilko (Russian wheat aphid); Dysaphis plantaginea Paaserini (rosy apple aphid); Eriosoma lanigerum Hausmann (woolly apple aphid); Brevicoryne brassicae Linnaeus (cabbage aphid); Hyalopterus pruni Geoffroy (mealy plum aphid); Lipaphis erysimi Kaltenbach (turnip aphid); Metopolophium dirrhodum Walker (cereal aphid); Macrosiphum euphorbiae Thomas (potato aphid); Myzus persicae Sulzer (peach-potato aphid, green peach aphid); Nasonovia ribisnigri Mosley (lettuce aphid); Pemphigus spp. (root aphids and gall aphids); Rhopalosiphum maidis Fitch (corn leaf aphid); R. padi Linnaeus (bird cherry-oat aphid); Schizaphis graminum Rondani (greenbug); Sipha flava Forbes (yellow sugarcane aphid); Sitobion avenae Fabricius (English grain aphid); Therioaphis maculata Buckton (spotted alfalfa aphid); Toxoptera aurantii Boyer de Fonscolombe (black citrus aphid) and T. citricida Kirkaldy (brown citrus aphid); Adelges spp. (adelgids); Phylloxera devastatrix Pergande (pecan phylloxera); Bemisia tabaci Gennadius (tobacco whitefly, sweetpotato whitefly); B. argentifolii Bellows & Perring (silverleaf whitefly); Dialeurodes citri Ashmead (citrus whitefly); Trialeurodes abutiloneus (bandedwinged whitefly) and T. vaporariorum Westwood (greenhouse whitefly); Empoasca fabae Harris (potato leafhopper); Laodelphax striatellus Fallen (smaller brown planthopper); Macrolestes quadrilineatus Forbes (aster leafhopper); Nephotettix cinticeps Uhler (green leafhopper); N. nigropictus Stål (rice leafhopper); Nilaparvata lugens Stål (brown planthopper); Peregrinus maidis Ashmead (corn planthopper); Sogatella furcifera Horvath (white-backed planthopper); Sogatodes orizicola Muir (rice delphacid); Typhlocyba pomaria McAtee (white apple leafhopper); Erythroneoura spp. (grape leafhoppers); Magicicada septendecim Linnaeus (periodical cicada); Icerya purchasi Maskell (cottony cushion scale); Quadraspidiotus pemiciosus Comstock (San Jose scale); Planococcus citri Risso (citrus mealybug); Pseudococcus spp. (other mealybug complex); Cacopsylla pyricola Foerster (pear psylla); Trioza diospyri Ashmead (persimmon psylla).

[0422] Agronomically important species of interest from the order Hemiptera include, but are not limited to: Acrosternum hilare Say (green stink bug); Anasa tristis De Geer (squash bug); Blissus leucopterus leucopterus Say (chinch bug); Corythuca gossypii Fabricius (cotton lace bug); Cyrtopeltis modesta Distant (tomato bug); Dysdercus suturellus Herrich-Schaffer (cotton stainer); Euschistus servus Say (brown stink bug); E. variolarius Palisot de Beauvois (one-spotted stink bug); Graptostethus spp. (complex of seed bugs); Leptoglossus corculus Say (leaf-footed pine seed bug); Lygus lineolaris Palisot de Beauvois (tarnished plant bug); L. Hesperus Knight (Western tarnished plant bug); L. pratensis Linnaeus (common meadow bug); L. rugulipennis Poppius (European tarnished plant bug); Lygocoris pabulinus Linnaeus (common green capsid); Nezara viridula Linnaeus (southern green stink bug); Oebalus pugnax Fabricius (rice stink bug); Oncopeltus fasciatus Dallas (large milkweed bug); Pseudatomoscelis seriatus Reuter (cotton fleahopper).

[0423] Furthermore, embodiments may be effective against Hemiptera such, Calocoris norvegicus Gmelin (strawberry bug); Orthops campestris Linnaeus; Plesiocoris rugicollis Fallen (apple capsid); Cyrtopeltis modestus Distant (tomato bug); Cyrtopeltis notatus Distant (suckfly); Spanagonicus albofasciatus Reuter (whitemarked fleahopper); Diaphnocoris chlorionis Say (honeylocust plant bug); Labopidicola allii Knight (onion plant bug); Pseudatomoscelis seriatus Reuter (cotton fleahopper); Adelphocoris rapidus Say (rapid plant bug); Poecilocapsus lineatus Fabricius (four-lined plant bug); Nysius ericae Schilling (false chinch bug); Nysius raphanus Howard (false chinch bug); Nezara viridula Linnaeus (Southern green stink bug); Eurygaster spp.; Coreidae spp.; Pyrrhocoridae spp.; Tinidae spp.; Blostomatidae spp.; Reduviidae spp. and Cimicidae spp.

[0424] Also included are adults and larvae of the order Acari (mites) such as Aceria tosichella Keifer (wheat curl mite); Petrobia latens Müller (brown wheat mite); spider mites and red mites in the family Tetranychidae, Panonychus ulmi Koch (European red mite); Tetranychus urticae Koch (two spotted spider mite); (T. mcdanieli McGregor (McDaniel mite); T. cinnabarinus Boisduval (carmine spider mite); T. turkestani Ugarov & Nikolski (strawberry spider mite); flat mites in the family Tenuipalpidae, Brevipalpus lewisi McGregor (citrus flat mite); rust and bud mites in the family Eriophyidae and other foliar feeding mites and mites important in human and animal health, i.e., dust mites in the family Epidermoptidae, follicle mites in the family Demodicidae, grain mites in the family Glycyphagidae, ticks in the order lxodidae: Ixodes scapularis Say (deer tick); I. holocyclus Neumann (Australian paralysis tick); Dermacentor variabilis Say (American dog tick); Amblyomma americanum Linnaeus (lone star tick) and scab and itch mites in the families Psoroptidae, Pyemotidae and Sarcoptidae.

[0425] Insect pests of the order Thysanura are of interest, such as Lepisma saccharina Linnaeus (silverfish); Thermobia domestica Packard (firebrat).

[0426] Additional arthropod pests covered include: spiders in the order Araneae such as Loxosceles reclusa Gertsch and Mulaik (brown recluse spider) and the Latrodectus mactans Fabricius (black widow spider) and centipedes in the order Scutigeromorpha such as Scutigera coleoptrata Linnaeus (house centipede).

[0427] Insect pest of interest include the superfamily of stink bugs and other related insects including but not limited to species belonging to the family Pentatomidae (Nezara viridula, Halyomorpha halys, Piezodorus guildini, Euschistus servus, Acrosternum hilare, Euschistus heros, Euschistus tristigmus, Acrosternum hilare, Dichelops furcatus, Dichelops melacanthus, and Bagrada hilaris (Bagrada Bug)), the family Plataspidae (Megacopta cribraria—Bean plataspid) and the family Cydnidae (Scaptocoris castanea—Root stink bug) and Lepidoptera species including but not limited to: diamond-back moth, e.g., Helicoverpa zea Boddie; soybean looper, e.g., Pseudoplusia includens Walker and velvet bean caterpillar e.g., Anticarsia gemmatalis Hübner.

[0428] Methods for measuring pesticidal activity are well known in the art. See, for example, Czapla and Lang, (1990) J. Econ. Entomol. 83:2480-2485; Andrews, et al., (1988) Biochem. J. 252:199-206; Marrone, et al., (1985) J. of Economic Entomology 78:290-293 and U.S. Pat. No. 5,743,477, all of which are herein incorporated by reference in their entirety. Generally, the protein is mixed and used in feeding assays. See, for example Marrone, et al., (1985) J. of Economic Entomology 78:290-293. Such assays can include contacting plants with one or more pests and determining the plant's ability to survive and/or cause the death of the pests.

[0429] Nematodes include parasitic nematodes such as root-knot, cyst and lesion nematodes, including Heterodera spp., Meloidogyne spp. and Globodera spp.; particularly members of the cyst nematodes, including, but not limited to, Heterodera glycines (soybean cyst nematode); Heterodera schachtii (beet cyst nematode); Heterodera avenae (cereal cyst nematode) and Globodera rostochiensis and Globodera pailida (potato cyst nematodes). Lesion nematodes include Pratylenchus spp.

### Seed Treatment

[0430] To protect and to enhance yield production and trait technologies, seed treatment options can provide additional crop plan flexibility and cost effective control against insects, weeds and diseases. Seed material can be treated, typically surface treated, with a composition comprising combinations of chemical or biological herbicides, herbicide safeners, insecticides, fungicides, germination inhibitors and enhancers, nutrients, plant growth regulators and activators, bactericides, nematocides, avicides and/or molluscicides. These compounds are typically formulated together with further carriers, surfactants or application-promoting adjuvants customarily employed in the art of formulation. The coatings may be applied by impregnating propagation material with a liquid formulation or by coating with a combined wet or dry formulation. Examples of the various types of compounds that may be used as seed treatments are provided in The Pesticide Manual: A World Compendium, C. D. S. Tomlin Ed., Published by the British Crop Production Council, which is hereby incorporated by reference.

[0431] Some seed treatments that may be used on crop seed include, but are not limited to, one or more of abscisic acid, acibenzolar-S-methyl, avermectin, amitrol, azaconazole, azospirillum, azadirachtin, azoxystrobin, Bacillus spp. (including one or more of cereus, firmus, megaterium, pumilis, sphaericus, subtilis and/or thuringiensis species), bradyrhizobium spp. (including one or more of betae, canariense, elkanii, iriomotense, japonicum, liaonigense, pachyrhizi and/or yuanmingense), captan, carboxin, chitosan, clothianidin, copper, cyazypyr, difenoconazole, etidiazole, fipronil, fludioxonil, fluoxastrobin, fluquinconazole, flurazole, fluxofenim, harpin protein, imazalil, imidacloprid, ipconazole, isoflavenoids, lipo-chitooligosaccharide, mancozeb, manganese, maneb, mefenoxam, metalaxyl, metconazole, myclobutanil, PCNB, penflufen, penicillium, penthiopyrad, permethrine, picoxystrobin, prothioconazole, pyraclostrobin, rynaxypyr, S-metolachlor, saponin, sedaxane, TCMTB, tebuconazole, thiabendazole, thiamethoxam, thiocarb, thiram, tolclofos-methyl, triadimenol, trichoderma, trifloxystrobin, triticonazole and/or zinc. PCNB seed coat refers to EPA Registration Number 00293500419, containing quintozen and terrazole. TCMTB refers to 2-(thiocyanomethylthio) benzothiazole.

[0432] Seed varieties and seeds with specific transgenic traits may be tested to determine which seed treatment options and application rates may complement such varieties and transgenic traits in order to enhance yield. For example, a variety with good yield potential but head smut susceptibility may benefit from the use of a seed treatment that provides protection against head smut, a variety with good yield potential but cyst nematode susceptibility may benefit from the use of a seed treatment that provides protection against cyst nematode, and so on. Likewise, a variety encompassing a transgenic trait conferring insect resistance may benefit from the second mode of action conferred by the seed treatment, a variety encompassing a transgenic trait conferring herbicide resistance may benefit from a seed treatment with a safener that enhances the plants resistance to that herbicide, etc. Further, the good root establishment and early emergence that results from the proper use of a seed treatment may result in more efficient nitrogen use, a better ability to withstand drought and an overall increase in yield potential of a variety or varieties containing a certain trait when combined with a seed treatment.

### Methods for Killing an Insect Pest and Controlling an Insect Population

[0433] In some embodiments methods are provided for killing an insect pest, comprising contacting the insect pest with an insecticidally-effective amount of a recombinant PtIP-83 polypeptide. In some embodiments methods are provided for killing an insect pest, comprising contacting the insect pest with an insecticidally-effective amount of a recombinant pesticidal protein of SEQ ID NO: 1, SEQ ID NO: 3, SEQ ID NO: 5, SEQ ID NO: 7, SEQ ID NO: 9, SEQ ID NO: 11, SEQ ID NO: 13, SEQ ID NO: 15, SEQ ID NO: 17, SEQ ID NO: 19, SEQ ID NO: 21, SEQ ID NO: 23, SEQ ID NO: 716, SEQ ID NO: 754, SEQ ID NO: 755, SEQ ID NO: 756, SEQ ID NO: 757, SEQ ID NO: 758, SEQ ID NO: 759, SEQ ID NO: 760, SEQ ID NO: 761, SEQ ID NO: 762, SEQ ID NO: 763, SEQ ID NO: 764, SEQ ID NO: 765, SEQ ID NO: 766, SEQ ID NO: 767, SEQ ID NO: 768, SEQ ID NO: 769 or a variant thereof.

[0434] In some embodiments methods are provided for killing an insect pest, comprising contacting the insect pest with an insecticidally-effective amount of a recombinant PtIP-83 polypeptide of SEQ ID NO: 236-299, SEQ ID NO: 334-367, SEQ ID NO: 398-427, SEQ ID NO: 518-607, SEQ ID NO: 640-645, and SEQ ID NO: 728-737.

[0435] In some embodiments methods are provided for killing an insect pest, comprising contacting the insect pest with an insecticidally-effective amount of a recombinant PtIP-83 polypeptide comprising an amino acid sequence of any one of SEQ ID NO: 786-888 or a variant thereof.

[0436] In some embodiments methods are provided for controlling an insect pest population, comprising contacting the insect pest population with an insecticidally-effective amount of a recombinant PtIP-83 polypeptide. In some embodiments methods are provided for controlling an insect pest population, comprising contacting the insect pest population with an insecticidally-effective amount of a recombinant PtIP-83 polypeptide of SEQ ID NO: 1, SEQ ID NO: 3, SEQ ID NO: 5, SEQ ID NO: 7, SEQ ID NO: 9, SEQ ID NO: 11, SEQ ID NO: 13, SEQ ID NO: 15, SEQ ID NO: 17, SEQ ID NO: 19, SEQ ID NO: 21, SEQ ID NO: 23, SEQ ID NO: 716, SEQ ID NO: 754, SEQ ID NO: 755, SEQ ID NO: 756, SEQ ID NO: 757, SEQ ID NO: 758, SEQ ID NO: 759, SEQ ID NO: 760, SEQ ID NO: 761, SEQ ID NO: 762, SEQ ID NO: 763, SEQ ID NO: 764, SEQ ID NO: 765, SEQ ID NO: 766, SEQ ID NO: 767, SEQ ID NO: 768, SEQ ID NO: 769 or a variant thereof. As used herein, “controlling a pest population” or “controls a pest” refers to any effect on a pest that results in limiting the damage that the pest causes.

[0437] Controlling a pest includes, but is not limited to, killing the pest, inhibiting development of the pest, altering fertility or growth of the pest in such a manner that the pest provides less damage to the plant, decreasing the number of offspring produced, producing less fit pests, producing pests more susceptible to predator attack or deterring the pests from eating the plant.

[0438] In some embodiments methods are provided for controlling an insect pest population, comprising contacting the insect pest population with an insecticidally-effective amount of a recombinant PtIP-83 polypeptide of any one of SEQ ID NO: 236-299, SEQ ID NO: 334-367, SEQ ID NO: 398-427, SEQ ID NO: 518-607, SEQ ID NO: 640-645, and SEQ ID NO: 728-737.

[0439] In some embodiments methods are provided for controlling an insect pest population, comprising contacting the insect pest population with an insecticidally-effective amount of a recombinant PtIP-83 polypeptide of any one of SEQ ID NO: 786-888 or a variant thereof.

[0440] In some embodiments methods are provided for protecting a plant from an insect pest, comprising expressing in the plant or cell thereof at least one recombinant polynucleotide encoding a PtIP-83 polypeptide. In some embodiments methods are provided for protecting a plant from an insect pest, comprising expressing in the plant or cell thereof a recombinant polynucleotide encoding a PtIP-83 polypeptide of SEQ ID NO: 1, SEQ ID NO: 3, SEQ ID NO: 5, SEQ ID NO: 7, SEQ ID NO: 9, SEQ ID NO: 11, SEQ ID NO: 13, SEQ ID NO: 15, SEQ ID NO: 17, SEQ ID NO: 19, SEQ ID NO: 21, SEQ ID NO: 23, SEQ ID NO: 716, SEQ ID NO: 754, SEQ ID NO: 755, SEQ ID NO: 756, SEQ ID NO: 757, SEQ ID NO: 758, SEQ ID NO: 759, SEQ ID NO: 760, SEQ ID NO: 761, SEQ ID NO: 762, SEQ ID NO: 763, SEQ ID NO: 764, SEQ ID NO: 765, SEQ ID NO: 766, SEQ ID NO: 767, SEQ ID NO: 768 or SEQ ID NO: 769 or variants thereof.

[0441] In some embodiments methods are provided for protecting a plant from an insect pest, comprising expressing in the plant or cell thereof at least one recombinant polynucleotide encoding a PtIP-83 polypeptide. In some embodiments methods are provided for protecting a plant from an insect pest, comprising expressing in the plant or cell thereof a recombinant polynucleotide encoding a PtIP-83 polypeptide of any one of SEQ ID NO: 236-299, SEQ ID NO: 334-367, SEQ ID NO: 398-427, SEQ ID NO: 518-607, SEQ ID NO: 640-645, and SEQ ID NO: 728-737.

[0442] In some embodiments methods are provided for protecting a plant from an insect pest, comprising expressing in the plant or cell thereof at least one recombinant polynucleotide encoding a PtIP-83 polypeptide. In some embodiments methods are provided for protecting a plant from an insect pest, comprising expressing in the plant or cell thereof a recombinant polynucleotide encoding a PtIP-83 polypeptide of any one of SEQ ID NO: 786-888 or a variant thereof.

### Insect Resistance Management (IRM) Strategies

[0443] Expression of B. thuringiensis δ-endotoxins in transgenic corn plants has proven to be an effective means of controlling agriculturally important insect pests (Perlak, et al., 1990; 1993). However, insects have evolved that are resistant to B. thuringiensis δ-endotoxins expressed in transgenic plants. Such resistance, should it become widespread, would clearly limit the commercial value of germplasm containing genes encoding such B. thuringiensis δ-endotoxins.

[0444] One way to increasing the effectiveness of the transgenic insecticides against target pests and contemporaneously reducing the development of insecticide-resistant pests is to use provide non-transgenic (i.e., non-insecticidal protein) refuges (a section of non-insecticidal crops/corn) for use with transgenic crops producing a single insecticidal protein active against target pests. The United States Environmental Protection Agency (epa.gov/oppbppdl/biopesticides/pips/bt_corn_refuge_2006.htm, which can be accessed using the www prefix) publishes the requirements for use with transgenic crops producing a single Bt protein active against target pests. In addition, the National Corn Growers Association, on their website: (ncga.com/insect-resistance-management-fact-sheet-bt-corn, which can be accessed using the www prefix) also provides similar guidance regarding refuge requirements. Due to losses to insects within the refuge area, larger refuges may reduce overall yield.

[0445] Another way of increasing the effectiveness of the transgenic insecticides against target pests and contemporaneously reducing the development of insecticide-resistant pests would be to have a repository of insecticidal genes that are effective against groups of insect pests and which manifest their effects through different modes of action.

[0446] Expression in a plant of two or more insecticidal compositions toxic to the same insect species, each insecticide being expressed at efficacious levels would be another way to achieve control of the development of resistance. This is based on the principle that evolution of resistance against two separate modes of action is far more unlikely than only one. Roush, for example, outlines two-toxin strategies, also called “pyramiding” or “stacking,” for management of insecticidal transgenic crops. (The Royal Society. Phil. Trans. R. Soc. Lond. B. (1998) 353:1777-1786). Stacking or pyramiding of two different proteins each effective against the target pests and with little or no cross-resistance can allow for use of a smaller refuge. The US Environmental Protection Agency requires significantly less (generally 5%) structured refuge of non-Bt corn be planted than for single trait products (generally 20%). There are various ways of providing the IRM effects of a refuge, including various geometric planting patterns in the fields and in-bag seed mixtures, as discussed further by Roush.

[0447] In some embodiments the PtIP-83 polypeptide of the disclosure are useful as an insect resistance management strategy in combination (i.e., pyramided) with other pesticidal proteins include but are not limited to Bt toxins, Xenorhabdus sp. or Photorhabdus sp. insecticidal proteins, and the like.

[0448] Provided are methods of controlling Lepidoptera and/or Coleoptera insect infestation(s) in a transgenic plant that promote insect resistance management, comprising expressing in the plant at least two different insecticidal proteins having different modes of action.

[0449] In some embodiments the methods of controlling Lepidoptera and/or Coleoptera insect infestation in a transgenic plant and promoting insect resistance management the at least one of the insecticidal proteins comprise a PtIP-83 polypeptide insecticidal to insects in the order Lepidoptera and/or Coleoptera.

[0450] In some embodiments the methods of controlling Lepidoptera and/or Coleoptera insect infestation in a transgenic plant and promoting insect resistance management the at least one of the insecticidal proteins comprises a PtIP-83 polypeptide of SEQ ID NO: 1, SEQ ID NO: 3, SEQ ID NO: 5, SEQ ID NO: 7, SEQ ID NO: 9, SEQ ID NO: 11, SEQ ID NO: 13, SEQ ID NO: 15, SEQ ID NO: 17, SEQ ID NO: 19, SEQ ID NO: 21, SEQ ID NO: 23, SEQ ID NO: 716, SEQ ID NO: 754, SEQ ID NO: 755, SEQ ID NO: 756, SEQ ID NO: 757, SEQ ID NO: 758, SEQ ID NO: 759, SEQ ID NO: 760, SEQ ID NO: 761, SEQ ID NO: 762, SEQ ID NO: 763, SEQ ID NO: 764, SEQ ID NO: 765, SEQ ID NO: 766, SEQ ID NO: 767, SEQ ID NO: 768, SEQ ID NO: 769 or variants thereof, insecticidal to insects in the order Lepidoptera and/or Coleoptera.

[0451] In some embodiments the methods of controlling Lepidoptera and/or Coleoptera insect infestation in a transgenic plant and promoting insect resistance management the at least one of the insecticidal proteins comprises a PtIP-83 polypeptide of any one of SEQ ID NO: 236-299, SEQ ID NO: 334-367, SEQ ID NO: 398-427, SEQ ID NO: 518-607, SEQ ID NO: 640-645, and SEQ ID NO: 728-737.

[0452] In some embodiments the methods of controlling Lepidoptera and/or Coleoptera insect infestation in a transgenic plant and promoting insect resistance management comprise expressing in the transgenic plant a PtIP-83 polypeptide and a Cry protein insecticidal to insects in the order Lepidoptera and/or Coleoptera having different modes of action.

[0453] In some embodiments the methods of controlling Lepidoptera and/or Coleoptera insect infestation of a transgenic plant and promoting insect resistance management comprise in the transgenic plant a PtIP-83 polypeptide of SEQ ID NO: 1, SEQ ID NO: 3, SEQ ID NO: 5, SEQ ID NO: 7, SEQ ID NO: 9, SEQ ID NO: 11, SEQ ID NO: 13, SEQ ID NO: 15, SEQ ID NO: 17, SEQ ID NO: 19, SEQ ID NO: 21, SEQ ID NO: 23, SEQ ID NO: 716, SEQ ID NO: 754, SEQ ID NO: 755, SEQ ID NO: 756, SEQ ID NO: 757, SEQ ID NO: 758, SEQ ID NO: 759, SEQ ID NO: 760, SEQ ID NO: 761, SEQ ID NO: 762, SEQ ID NO: 763, SEQ ID NO: 764, SEQ ID NO: 765, SEQ ID NO: 766, SEQ ID NO: 767, SEQ ID NO: 768, SEQ ID NO: 769 or variants thereof and a Cry protein insecticidal to insects in the order Lepidoptera and/or Coleoptera having different modes of action.

[0454] Also provided are methods of reducing likelihood of emergence of Lepidoptera and/or Coleoptera insect resistance to transgenic plants expressing in the plants insecticidal proteins to control the insect species, comprising expression of a PtIP-83 polypeptide insecticidal to the insect species in combination with a second insecticidal protein to the insect species having different modes of action.

[0455] Also provided are means for effective Lepidoptera and/or Coleoptera insect resistance management of transgenic plants, comprising co-expressing at high levels in the plants two or more insecticidal proteins toxic to Lepidoptera and/or Coleoptera insects but each exhibiting a different mode of effectuating its killing activity, wherein the two or more insecticidal proteins comprise a PtIP-83 polypeptide and a Cry protein. Also provided are means for effective Lepidoptera and/or Coleoptera insect resistance management of transgenic plants, comprising co-expressing at high levels in the plants two or more insecticidal proteins toxic to Lepidoptera and/or Coleoptera insects but each exhibiting a different mode of effectuating its killing activity, wherein the two or more insecticidal proteins comprise a PtIP-83 polypeptide of SEQ ID NO: 1, SEQ ID NO: 3, SEQ ID NO: 5, SEQ ID NO: 7, SEQ ID NO: 9, SEQ ID NO: 11, SEQ ID NO: 13, SEQ ID NO: 15, SEQ ID NO: 17, SEQ ID NO: 19, SEQ ID NO: 21, SEQ ID NO: 23, SEQ ID NO: 716, SEQ ID NO: 754, SEQ ID NO: 755, SEQ ID NO: 756, SEQ ID NO: 757, SEQ ID NO: 758, SEQ ID NO: 759, SEQ ID NO: 760, SEQ ID NO: 761, SEQ ID NO: 762, SEQ ID NO: 763, SEQ ID NO: 764, SEQ ID NO: 765, SEQ ID NO: 766, SEQ ID NO: 767, SEQ ID NO: 768, SEQ ID NO: 769 or variants thereof and a Cry protein.

[0456] In addition, methods are provided for obtaining regulatory approval for planting or commercialization of plants expressing proteins insecticidal to insects in the order Lepidoptera and/or Coleoptera, comprising the step of referring to, submitting or relying on insect assay binding data showing that the PtIP-83 polypeptide does not compete with binding sites for Cry proteins in such insects. In addition, methods are provided for obtaining regulatory approval for planting or commercialization of plants expressing proteins insecticidal to insects in the order Lepidoptera and/or Coleoptera, comprising the step of referring to, submitting or relying on insect assay binding data showing that the PtIP-83 polypeptide of SEQ ID NO: 1, SEQ ID NO: 3, SEQ ID NO: 5, SEQ ID NO: 7, SEQ ID NO: 9, SEQ ID NO: 11, SEQ ID NO: 13, SEQ ID NO: 15, SEQ ID NO: 17, SEQ ID NO: 19, SEQ ID NO: 21, SEQ ID NO: 23, SEQ ID NO: 716, SEQ ID NO: 754, SEQ ID NO: 755, SEQ ID NO: 756, SEQ ID NO: 757, SEQ ID NO: 758, SEQ ID NO: 759, SEQ ID NO: 760, SEQ ID NO: 761, SEQ ID NO: 762, SEQ ID NO: 763, SEQ ID NO: 764, SEQ ID NO: 765, SEQ ID NO: 766, SEQ ID NO: 767, SEQ ID NO: 768, SEQ ID NO: 769 or variant thereof does not compete with binding sites for Cry proteins in such insects.

### Methods for Increasing Plant Yield

[0457] Methods for increasing plant yield are provided. The methods comprise providing a plant or plant cell expressing a polynucleotide encoding the pesticidal polypeptide sequence disclosed herein and growing the plant or a seed thereof in a field infested with a pest against which the polypeptide has pesticidal activity. In some embodiments, the polypeptide has pesticidal activity against a Lepidopteran, Coleopteran, Dipteran, Hemipteran or nematode pest, and the field is infested with a Lepidopteran, Hemipteran, Coleopteran, Dipteran or nematode pest.

[0458] As defined herein, the “yield” of the plant refers to the quality and/or quantity of biomass produced by the plant. “Biomass” as used herein refers to any measured plant product. An increase in biomass production is any improvement in the yield of the measured plant product. Increasing plant yield has several commercial applications. For example, increasing plant leaf biomass may increase the yield of leafy vegetables for human or animal consumption. Additionally, increasing leaf biomass can be used to increase production of plant-derived pharmaceutical or industrial products. An increase in yield can comprise any statistically significant increase including, but not limited to, at least a 1% increase, at least a 3% increase, at least a 5% increase, at least a 10% increase, at least a 20% increase, at least a 30%, at least a 50%, at least a 70%, at least a 100% or a greater increase in yield compared to a plant not expressing the pesticidal sequence.

[0459] In specific methods, plant yield is increased as a result of improved pest resistance of a plant expressing a PtIP-83 polypeptide disclosed herein. Expression of the PtIP-83 polypeptide results in a reduced ability of a pest to infest or feed on the plant, thus improving plant yield.

### Methods of Processing

[0460] Further provided are methods of processing a plant, plant part or seed to obtain a food or feed product from a plant, plant part or seed comprising a PtIP-83 polypeptide. The plants, plant parts or seeds provided herein, can be processed to yield oil, protein products and/or by-products that are derivatives obtained by processing that have commercial value. Non-limiting examples include transgenic seeds comprising a nucleic acid molecule encoding a PtIP-83 polypeptide which can be processed to yield soy oil, soy products and/or soy by-products.

[0461] “Processing” refers to any physical and chemical methods used to obtain any soy product and includes, but is not limited to, heat conditioning, flaking and grinding, extrusion, solvent extraction or aqueous soaking and extraction of whole or partial seeds

[0462] The following examples are offered by way of illustration and not by way of limitation.

### EXPERIMENTALS

### Example 1—Identification of an Insecticidal Protein Active Against Broad Spectrum of Lepidopteran Insects from the Fern, Adiantum pedatum, (PS-7140)

[0463] The insecticidal protein PtIP-83Aa (SEQ ID NO: 1) was identified by protein purification, mass spectroscopy (MS) and PCR cloning from Adiantum pedatum, (PS-7140) as follows.

[0464] Adiantum pedatum was collected by a collaborator and assigned identification number PS-7140. PS-7140 was collected, flash frozen in liquid N2 and stored at −800 C. After storage it was ground to a fine powder at liquid N2 temperatures with a Geno Ball Mill (SPEX, Metuchen, NJ). To extract protein, 20 mL of 50 mM Tris buffer, pH 8.0, 150 mM KCl, 2.5 mM EDTA, 1.5% polyvinylpolypyrrolidone (PVPP) and protease inhibitor cocktail (Roche Diagnostics, Germany) was added to every 5 g fresh weight of tissue. The homogenate was centrifuged to remove cell debris, filtered through 0.22 um filters and desalted using 10 ml Zeba Spin Desalting columns (Thermo Scientific, IL.)

[0465] Bioassays against the three pest species, Soybean Looper (SBL) (Chrysodeixis includens), Corn Earworm (CEW) (Helicoverpa zea) and European Corn Borer (ECB) (Ostrinia nubilalis) were conducted using the desalted protein extract overlaid onto an agar-based Lepidoptera diet (Southland Products Inc., Lake Village, AR) in a 96-well plate format. Six replicates were used per sample. Samples were allowed to dry on top of the diet and two to five neonate insects were placed into each well of the treated plate. After four days of incubation at 27° C. larvae were scored for mortality or severity of stunting. The scores were recorded numerically as dead (3), severely stunted (2) (little or no growth but alive and equivalent to a 1st instar larvae), stunted (1) (growth to second instar but not equivalent to controls), or normal (0). Subjecting the sample to proteinase K and heat treatments resulted in loss of activity indicating that the active principle was proteinaceous in nature. Bioassay results are shown in Table 6.

TABLE 6

Activity of A. pedatum crude protein
extract against Lepidoptera larvae

| | | | Ave. Score after |
|---|---|---|---|
| | | Ave. Score | Proteinase K/Heat |
| Neonate | Soybean Looper | 3 | 0 |
| | Corn Earworm | 2 | 0 |
| | European Corn | 1.5 | 0 |
| | Borer | | |

[0466] For protein purification, PS-7140 fronds were ground to a fine powder at liquid N2 temperatures with a Geno Ball Mill (SPEX, Metuchen, NJ). Protein was extracted in 100 mM Tris buffer, pH 8.0, 150 mM KCl, 2.5 mM EDTA, 1.5% PVPP and protease inhibitor cocktail (Roche Diagnostics, Germany). The extracted material was centrifuged to remove cell debris, filtered through Miracloth™ (Calbiochem) and then ammonium sulfate added to 35% and allowed to equilibrate. The suspension was centrifuged and the resulting pellet was resuspended in a small volume of 20 mM Tris buffer, pH 8. After clarification by centrifugation it was desalted using a Sephadex G25 column (GE, Piscataway, NJ) equilibrated in 20 mM Tris buffer, pH 8. The desalted protein fraction pool was loaded onto a 1 ml Mono Q column (GE, Piscataway, N.J.) and eluted with a linear (60 CV (column volumes) gradient from 0 M to 0.7 M NaCl in 20 mM Tris, pH 8.0. Fractions active against SBL and ECB were combined and desalted into 25 mM MOPS, pH 6.7. This was then loaded onto a 4 mL Mono P column (Buffer A: 25 mM MOPS, pH 6.7; Buffer B: Polybuffer 74, pH 4) using a 4 CV linear gradient (0% Buffer B) followed by a 15 CV 100% Buffer B wash. 1 mL fractions were collected. Fractions 47 and 48 showed activity against ECB and SBL. Based on LDS-PAGE these active fractions contained a protein band at approximately 95 kDa. The protein representing the 95 kDa band was named PtIP-83Aa (SEQ ID NO: 1).

[0467] Protein identification was performed by MS analysis after protein digestion with trypsin. Proteins for MS identification were obtained after running the sample on an LDS-PAGE gel stained with Brilliant Blue G-250 Stain. Bands of interest were excised from the gel, de-stained, reduced with dithiothreitol and then alkylated with iodoacetamide. Following overnight digestion with trypsin, samples were analyzed by nano-liquid chromatography/electrospray tandem mass spectrometry (nano-LC/ES-MSMS) on a Thermo Q Exactive Orbitrap mass spectrometer (Thermo Fisher Scientific) interfaced with an Eksigent NanoLC Ultra 1-D Plus nano-Ic system and a nanolc-as2 autosampler (AB Sciex). The protein identification was performed by searching the nano-LC/MSMS data against an in-house transcriptome database containing the transcripts from the source plant materials and the public protein database Swiss-Prot using the Mascot search engine (Matrix Science).

[0468] The amino acid sequence of SEQ ID NO: 1 was BLAST (Basic Local Alignment Search Tool; Altschul, et al., (1993) J. Mol. Biol. 215:403-410; see also ncbi.nlm.nih.gov/BLAST/, which can be accessed using the www prefix) searched against public and DUPONT-PIONEER internal databases that included plant protein sequences. Amino acid sequences were aligned with proteins in a proprietary DUPONT-PIONEER plant protein database.

### Example 2 Transcriptomic Sequencing of PtIP-83Aa

[0469] A transcriptome for Adiantum pedatum, PS-7140 was prepared as follows. Total RNAs were isolated from frozen tissues by use of the Qiagen® RNeasy® kit for total RNA isolation. Sequencing libraries from the resulting total RNAs were prepared using the TruSeg™ mRNA-Seq kit and protocol from Illumina®, Inc. (San Diego, CA). Briefly, mRNAs were isolated via attachment to oligo(dT) beads, fragmented to a mean size of 180 nt, reverse transcribed into cDNA by random hexamer prime, end repaired, 3′ A-tailed, and ligated with Illumina® indexed TruSeq™ adapters. Ligated cDNA fragments were PCR amplified using Illumina® TruSeq™ primers and purified PCR products were checked for quality and quantity on the Agilent Bioanalyzer® DNA 7500 chip. Post quality and quantity assessment, 100 ng of the transcript library was normalized by treatment with Duplex Specific Nuclease (DSN) (Evrogen®, Moscow, Russia). Normalization was accomplished by addition of 200 mM Hepes buffer, followed by heat denaturation and five hour anneal at 68° C. Annealed library was treated with 2 ul of DSN enzyme for 25 minutes, purified by Qiagen® MinElute® columns according to manufacturer protocols, and amplified twelve cycles using Illumina® adapter specific primers. Final products were purified with Ampure® XP beads (Beckman Genomics, Danvers, MA) and checked for quality and quantity on the Agilent Bioanalyzer® DNA 7500 chip.

[0470] Normalized transcript libraries were sequenced according to manufacturer protocols on the Illumina® Genome Analyzer 1lx. Each library was hybridized to two flow cell lanes and amplified, blocked, linearized and primer hybridized using the Illumina clonal cluster generation process on cBot®. Sequencing was completed on the Genome Analyzer IIx, generating sixty million 75 bp paired end reads per normalized library.

[0471] Peptide sequence identified for PtIP-83Aa (SEQ ID NO: 1) by LC-MS/MS/MS sequencing (described in Example 1) were searched against the protein sequences predicted by open reading frames (ORFs) from the internal transcriptome for PS-7140CF assemblies. The peptides gave a perfect match to a transcript corresponding to PtIP-83Aa (SEQ ID NO: 2). The coding sequences were used to design the following primers to clone the PtIP-83Aa coding sequence:

[0472] CCATGGCTCTCGTGGATTACGGCAAG (95KD N-T Nco I for) (SEQ ID NO: 30) and GTTAACCTACTCTTCGTCGTGCCGCCAGTC (95KD C-T Hpa I REV) (SEQ ID NO: 31). This clone was produced by polymerase chain reaction using the KOD Hot Start DNA Polymerase® PCR kit (Novagen, Merck KGaA, Darmstadt, Germany) and the total RNA from Adiantum pedatum as a template. The cloned PCR product was confirmed by sequencing.

[0473] Based on the DNA and protein sequencing, the PtIP-83Aa polynucleotide sequence is shown as SEQ ID NO: 2 and the polypeptide sequence as SEQ ID NO: 1.

### Example 3—Identification of PtIP-83 Homologs

[0474] Gene identities may be determined by conducting BLAST® (Basic Local Alignment Search Tool; Altschul, et al., (1993) J. Mol. Biol. 215:403-410; see also ncbi.nlm.nih.gov/BLAST/, which can be accessed using the www prefix) searches under default parameters for similarity to sequences. The polynucleotide sequence for PtIP-83Aa (SEQ ID NO: 2) was analyzed. No close homologs of PtIP-83Aa (SEQ ID NO: 1) were identified in public databases.

[0475] Gene identities conducted by BLAST® in a DUPONT PIONEER internal transcriptome database of ferns and other primitive plants identified homologs for PtIP-83Aa (SEQ ID NO: 1). The PtIP-83Aa homologs and the organism they were identified from are shown in Table 7.

TABLE 7

| | Sequence | | |
|---|---|---|---|
| | id no | Source | Organism |
| PtIP- | SEQ ID | PS-7140 | Adiantum pedatum |
| 83Aa | NO: 1 | | |
| PtIP- | SEQ ID | PS-11481 | Adiantum trapeziforme var. |
| 83Ca | NO: 5 | | braziliense |
| PtIP- | SEQ ID | PS-11481 | Adiantum trapeziforme var. |
| 83Cb | NO: 7 | | braziliense |
| PtIP- | SEQ ID | PS-11481 | Adiantum trapeziforme var. |
| 83Cc | NO: 9 | | braziliense |
| PtIP- | SEQ ID | PS-11481 | Adiantum trapeziforme var. |
| 83Cd | NO: 11 | | braziliense |
| PtIP- | SEQ ID | PS-12345 | Adiantum peruvianum |
| 83Ce | NO: 13 | | |
| PtIP- | SEQ ID | PS-9224 | Lygodium flexuosum |
| 83Cf | NO: 15 | | |
| PtIP- | SEQ ID | PS-12345 | Adiantum peruvianum |
| 83Cg | NO: 17 | | |
| PtIP- | SEQ ID | PS-12345 | Adiantum peruvianum |
| 83Da | NO: 19 | | |
| PtIP- | SEQ ID | PS-11481 | Adiantum trapeziforme var. |
| 83Ea | NO: 21 | | braziliense |
| PtIP- | SEQ ID | PS-11481 | Adiantum trapeziforme var. |
| 83Eb | NO: 23 | | braziliense |
| PtIP- | SEQ ID | PS-8568 | Microsorum musifolium |
| 83Fa | NO: 3 | | |
| PtIP- | SEQ ID | PS-9319 | Polypodium punctatum |
| 83Fb | NO: 716 | | ‘Serratum’ |
| PtIP- | SEQ ID | LW13327 | Polystichium tsus-simense |
| 83Ch | NO: 754 | | |
| PtIP- | SEQ ID | LW13327 | Polystichium tsus-simense |
| 83Ch- | NO: 755 | | |
| like | | | |
| PtIP- | SEQ ID | LW13327 | Polystichium tsus-simense |
| 83Fd | NO: 756 | | |
| PtIP- | SEQ ID | LW13327 | Polystichium tsus-simense |
| 83Fe | NO: 757 | | |
| PtIP- | SEQ ID | LW12354 | Rumohra adiantiformis |
| 83Ci | NO: 758 | | |
| PtIP- | SEQ ID | LW12354 | Rumohra adiantiformis |
| 83Ci- | NO: 759 | | |
| like | | | |
| PtIP- | SEQ ID | LW12354 | Rumohra adiantiformis |
| 83Ff | NO: 760 | | |
| PtIP- | SEQ ID | LW12354 | Rumohra adiantiformis |
| 83Ff- | NO: 761 | | |
| like | | | |
| PtIP- | SEQ ID | NY012 | Asplenium trichomanes |
| 83Cj | NO: 762 | | |
| PtIP- | SEQ ID | NY012 | Asplenium trichomanes |
| 83Cj- | NO: 763 | | |
| like | | | |
| PtIP- | SEQ ID | NY009 | Phyllitis scolopendium |
| 83Ga | NO: 764 | | ‘Angustifolia’ |
| PtIP- | SEQ ID | NY009 | Phyllitis scolopendium |
| 83Ga- | NO: 765 | | ‘Angustifolia’ |
| like | | | |
| PtIP- | SEQ ID | NY009 | Phyllitis scolopendium |
| 83Fg | NO: 766 | | ‘Angustifolia’ |
| PtIP- | SEQ ID | NY009 | Phyllitis scolopendium |
| 83Fh | NO: 767 | | ‘Angustifolia’ |
| PtIP- | SEQ ID | NY009 | Phyllitis scolopendium |
| 83Fi | NO: 768 | | ‘Angustifolia’ |
| PtIP- | SEQ ID | NY009 | Phyllitis scolopendium |
| 83Fi- | NO: 769 | | ‘Angustifolia’ |
| like | | | |

[0476] cDNA was generated from source organisms with identified homologs by reverse transcription from total RNA. Homologs were PCR amplified from their respective cNAs using primers designed to the coding sequences of each homolog and subcloned into a plant transient vector containing the DMMV promoter. Cloned PCR products were confirmed by sequencing. Cloning primers are shown in Table 8. The cDNA for homolog PtIP-83Fb was synthesized (SEQ ID NO: 717) based on the transcriptome assembly of PS-9319 and subcloned into a plant transient vector.

TABLE 8

| Gene | Primer | Sequence |
|---|---|---|
| PtIP-83Cb | GZ-550-83Ca-F | CGAAATCTCTCATCTAAGAGGCTGGATCCTAGGATGGATTACAG [symbol] |
| PtIP-83Cb | GZ-550-83Ca-R | TTAAGTTGGCCAATCCAGAAGATGGACAAGTCTAGACTACTCCT [symbol] |
| PtIP-83Ca, Cc, and Cd | GZ-550-83Ca-F | CGAAATCTCTCATCTAAGAGGCTGGATCCTAGGATGGATTACAG [symbol] |
| PtIP-83Ca, Cc, and Cd | 83Ca-1s-R | CAA GGA TTG CAT TGC TAG GAA GG (SEQ ID NO: 611) |
| PtIP-83Ca, Cc, and Cd | GZ-550-83Ca-R | TTAAGTTGGCCAATCCAGAAGATGGACAAGTCTAGACTACTCCT [symbol] |
| PtIP-83Ca, Cc, and Cd | 83Ca-1s | CCTTCCTAGCAATGCAATCCTTG (SEQ ID NO: 613) |
| PtIP-83Ce | GZ-550-83Ca-F | CGAAATCTCTCATCTAAGAGGCTGGATCCTAGGATGGATTACAG [symbol] |
| PtIP-83Ce | 550-12345-R | AAGTTGGCCAATCCAGAAGATGGACAAGTCTAGACTACTCCTCCT |
| PtIP-83Cf | 550-9224-F1 | CGAAATCTCTCATCTAAGAGGCTGGATCCTAGGATGGCCAGTGTA |
| PtIP-83Cf | 550-9224-R1 | TTAAGTTGGCCAATCCAGAAGATGGACAAGTCTAGACTACTCCT [symbol] |
| PtIP-83Cg | 550-11790.2-F | GAAATCTCTCATCTAAGAGGCTGGATCCTAGGATGGATTACAGCA |
| PtIP-83Cg | GZ-550-83Ca-R | TTAAGTTGGCCAATCCAGAAGATGGACAAGTCTAGACTACTCCT [symbol] |
| PtIP-83Da | GZ-550-83Ca-F | CGAAATCTCTCATCTAAGAGGCTGGATCCTAGGATGGATTACAG [symbol] |
| PtIP-83Da | 550-UTR8.7-R | GTTGGCCAATCCAGAAGATGGACAAGTCTAGATTAGAGTGGCTT [symbol] |
| PtIP-83Ea | GZ-550-83Ca-F | CGAAATCTCTCATCTAAGAGGCTGGATCCTAGGATGGATTACAG [symbol] |
| PtIP-83Ea | 550-12345-R | AAGTTGGCCAATCCAGAAGATGGACAAGTCTAGACTACTCCTCCT |
| PtIP-83Eb | GZ-550-83Ca-F | CGAAATCTCTCATCTAAGAGGCTGGATCCTAGGATGGATTACAG [symbol] |
| PtIP-83Eb | 550-12345-R | AAGTTGGCCAATCCAGAAGATGGACAAGTCTAGACTACTCCTCCT |
| PtIP-83Fa | infusion | TTTAACTTAGCCTAGGATCCATGGAATATAGCAGCTTGTAC |
| | bamHI | (SEQ ID NO: 32) |
| PtIP-83Fa | infusion | ACTCCTTCTTTAGTTAACTTACTCCACATCACCCTCTTGTCG |
| | HpaI | (SEQ ID NO: 33) |
| PtIP-83Ch and PtIP-83Ch-like | LW13327-F1 | cgaaatctctcatctaagaggctggatcctaggATGGATTACAGCACGCTTTA |
| PtIP-83Ch and PtIP-83Ch-like | LW13327-R1 | taagttggccaatccagaagatggacaagtctagaCTACTCCTCCACCTCCTG |
| PtIP-83Fd and PtIP-83Fe | LW13327-F2 | cgaaatctctcatctaagaggctggatcctaggATGACGATGGCGGCAACTG |
| PtIP-83Fd and PtIP-83Fe | LW13327-R2 | ggccaatccagaagatggacaagtctagaCTAGAAAGAAATTTTCCTGATA |
| PtIP-83Ci and PtIP-83Ci-like | LW12354-F1 | cgaaatctctcatctaagaggctggatcctaggATGGATTACAGCACTCTTTA |
| PtIP-83Ci and PtIP-83Ci-like | LW12354-R1 | taagttggccaatccagaagatggacaagtctagaCTACTCCTCTTGCCGCCA |
| PtIP-83Ff and PtIP-83Ff-like | LW12354-F2 | cgaaatctctcatctaagaggctggatcctaggATGGCTGCCTCCGCTGCTG |
| PtIP-83Ff and PtIP-83Ff-like | LW12354-R2 | taagttggccaatccagaagatggacaagtctagaCTAGAAAGAAATGCGC [symbol] |
| PtIP-83Cj and PtIP-83Cj-like | NY012-F1 | cgaaatctctcatctaagaggctggatcctaggATGGATTACAGCACGCTTTA |
| PtIP-83Cj and PtIP-83Cj-like | NY012-R1 | taagttggccaatccagaagatggacaagtctagaCTACTCCTCCTCCTCCT [symbol] |
| PtIP-83Ga and PtIP-83Ga-like | NY009-F1 | cgaaatctctcatctaagaggctggatcctaggATGGGTGTCACAGTCGTTA [symbol] |
| PtIP-83Ga and PtIP-83Ga-like | NY009-R1 | taagttggccaatccagaagatggacaagtctagaTTAGCTGACGACCTGAT [symbol] |
| PtIP-83Fg, Fi, and Fi-like | NY009-F2 | cgaaatctctcatctaagaggctggatcctaggATGGAGTATGGCAGCTTGT [symbol] |
| PtIP-83Fg, Fi, and Fi-like | NY009-R2a | gttggccaatccagaagatggacaagtctagaCTATAACTCCGCATCAGCTC [symbol] |
| PtIP-83Fh | NY009-F3 | cgaaatctctcatctaagaggctggatcctaggATGGAGTACTCCGACTTGTA |
| PtIP-83Fh | NY009-R3 | taagttggccaatccagaagatggacaagtctagaTCACTCCTCATCGACTT [symbol] |

[symbol]

indicates data missing or illegible when filed

[0477] Additional diversity was recovered by PCR amplification with primers designed to the non-coding regions flanking identified homologs. Primers were designed to conserved sequences in the 5′ and 3′ untranslated regions of PtIP-83Ca BLAST hits within the DUPONT PIONEER internal transcriptome database. Primers pairs (1) GCCTTTATCGACTCCTAATTCACACC (SEQ ID NO: 626) and CCACATTGTGCATTACGACCAC (SEQ ID NO: 627), and (2) CCAGTGATTTGAGTTCCTTCATTATG (SEQ ID NO: 628) and GAACAGTACATTGACTGCATGTGC (SEQ ID NO: 629) were used to generate PCR products from PS-11481 and PS-12345 cDNA. Resulting PCR products were blunt end cloned using the Zero Blunt® TOPOO PCR Cloning Kit (Invitrogen) and sequence analyzed. From this analysis, homologs PtIP-83Cg, Da, Ea, and Eb were identified and subcloned into the plant transient vector. Cloning primers are shown in Table 8.

[0478] The amino acid sequence identity of the PtIP-83Aa homologs as calculated using the Needleman-Wunsch algorithm, as implemented in the Needle program (EMBOSS tool suite) are shown in Table 9a-9c.

TABLE 9
a

| | PtIP- | PtIP- | PtIP- | PtIP- | PtIP- | PtIP- | PtIP- | PtIP- | PtIP- | PtIP- |
|---|---|---|---|---|---|---|---|---|---|---|
| | 83Ca | 83Cb | 83Cc | 83Cd | 83Ce | 83Cf | 83Cg | 83Ch-like | 83Ch | 83Ci-like |
| | SEQ | SEQ | SEQ | SEQ | SEQ | SEQ | SEQ | SEQ | SEQ | SEQ |
| | ID | ID | ID | ID | ID | ID | ID | ID | ID | ID |
| | NO: | NO: | NO: | NO: | NO: | NO: | NO: | NO: | NO: | NO: |
| . | 5 | 7 | 9 | 11 | 13 | 15 | 17 | 755 | 754 | 759 |
| PtIP-83Aa | 71.4 | 71.2 | 71.9 | 72.0 | 71.5 | 77.4 | 71.5 | 74.8 | 74.8 | 70.9 |
| SEQ ID NO: 1 | | | | | | | | | | |
| PtIP-83Ca | — | 76.4 | 98.5 | 98.2 | 98.0 | 79.3 | 76.6 | 80.6 | 80.6 | 75.8 |
| SEQ ID NO: 5 | | | | | | | | | | |
| PtIP-83Cb | — | — | 76.7 | 76.8 | 76.3 | 77.6 | 98.6 | 78.0 | 78.0 | 96.6 |
| SEQ ID NO: 7 | | | | | | | | | | |
| PtIP-83Cc | — | — | — | 99.8 | 99.5 | 79.1 | 76.9 | 80.8 | 80.8 | 75.8 |
| SEQ ID NO: 9 | | | | | | | | | | |
| PtIP-83Cd | — | — | — | — | 99.3 | 79.3 | 76.9 | 80.9 | 80.9 | 75.8 |
| SEQ ID NO: 11 | | | | | | | | | | |
| PtIP-83Ce | — | — | — | — | — | 78.7 | 76.5 | 80.6 | 80.6 | 75.6 |
| SEQ ID NO: 13 | | | | | | | | | | |
| PtIP-83Cf | — | — | — | — | — | — | 77.8 | 84.0 | 84.0 | 77.3 |
| SEQ ID NO: 15 | | | | | | | | | | |
| PtIP-83Cg | — | — | — | — | — | — | — | 78.2 | 78.2 | 97.1 |
| SEQ ID NO: 17 | | | | | | | | | | |
| PtIP-83Ch-like | — | — | — | — | — | — | — | — | 99.9 | 77.4 |
| SEQ ID NO: 755 | | | | | | | | | | |
| PtIP-83Ch | — | — | — | — | — | — | — | — | — | 77.4 |
| SEQ ID NO: 754 | | | | | | | | | | |
| PtIP-83Ci-like | — | — | — | — | — | — | — | — | — | — |
| SEQ ID NO: 759 | | | | | | | | | | |
| PtIP-83Ci | — | — | — | — | — | — | — | — | — | — |
| SEQ ID NO: 758 | | | | | | | | | | |
| PtIP-83Cj-like | — | — | — | — | — | — | — | — | — | — |
| SEQ ID NO: 763 | | | | | | | | | | |
| PtIP-83Cj | — | — | — | — | — | — | — | — | — | — |
| SEQ ID NO: 762 | | | | | | | | | | |
| PtIP-83Da | — | — | — | — | — | — | — | — | — | — |
| SEQ ID NO: 19 | | | | | | | | | | |
| PtIP-83Ea | — | — | — | — | — | — | — | — | — | — |
| SEQ ID NO: 21 | | | | | | | | | | |
| PtIP-83Eb | — | — | — | — | — | — | — | — | — | — |
| SEQ ID NO: 23 | | | | | | | | | | |
| PtIP-83Fa | — | — | — | — | — | — | — | — | — | — |
| SEQ ID NO: 3 | | | | | | | | | | |
| PtIP-83Fb | — | — | — | — | — | — | — | — | — | — |
| SEQ ID NO: 716 | | | | | | | | | | |
| PtIP-83Fd | — | — | — | — | — | — | — | — | — | — |
| SEQ ID NO: 756 | | | | | | | | | | |
| PtIP-83Fe | — | — | — | — | — | — | — | — | — | — |
| SEQ ID NO: 757 | | | | | | | | | | |
| PtIP-83Ff-like | — | — | — | — | — | — | — | — | — | — |
| SEQ ID NO: 761 | | | | | | | | | | |
| PtIP-83Ff | — | — | — | — | — | — | — | — | — | — |
| SEQ ID NO: 760 | | | | | | | | | | |
| PtIP-83Fg | — | — | — | — | — | — | — | — | — | — |
| SEQ ID NO: 766 | | | | | | | | | | |
| PtIP-83Fh | — | — | — | — | — | — | — | — | — | — |
| SEQ ID NO: 767 | | | | | | | | | | |
| PtIP-83Fi-like | — | — | — | — | — | — | — | — | — | — |
| SEQ ID NO: 769 | | | | | | | | | | |
| PtIP-83Fi | — | — | — | — | — | — | — | — | — | — |
| SEQ ID NO: 768 | | | | | | | | | | |
| PtIP-83Ga-like | — | — | — | — | — | — | — | — | — | — |
| SEQ ID NO: 765 | | | | | | | | | | |

b

| | PtIP- | PtIP- | PtIP- | PtIP- | PtIP- | PtIP- | PtIP- | PtIP- | PtIP- |
|---|---|---|---|---|---|---|---|---|---|
| | 83Ci | 83Cj-like | 83Cj | 83Da | 83Ea | 83Eb | 83Fa | 83Fb | 83Fd |
| | SEQ | SEQ | SEQ | SEQ | SEQ | SEQ | SEQ | SEQ | SEQ |
| | ID | ID | ID | ID | ID | ID | ID | ID | ID |
| | NO: | NO: | NO: | NO: | NO: | NO: | NO: | NO: | NO: |
| . | 758 | 763 | 762 | 19 | 21 | 23 | 3 | 716 | 756 |
| PtIP-83Aa | 71.0 | 75.5 | 73.6 | 64.7 | 55.8 | 55.4 | 49.8 | 50.1 | 50.8 |
| SEQ ID NO: 1 | | | | | | | | | |
| PtIP-83Ca | 75.9 | 79.5 | 77.5 | 89.7 | 68.6 | 79.1 | 48.8 | 48.3 | 48.8 |
| SEQ ID NO: 5 | | | | | | | | | |
| PtIP-83Cb | 96.7 | 79.5 | 77.2 | 68.8 | 59.3 | 60.2 | 49.7 | 49.3 | 50.4 |
| SEQ ID NO: 7 | | | | | | | | | |
| PtIP-83Cc | 76.0 | 79.8 | 77.8 | 91.1 | 70.1 | 80.4 | 49.2 | 48.7 | 49.1 |
| SEQ ID NO: 9 | | | | | | | | | |
| PtIP-83Cd | 76.0 | 79.9 | 77.9 | 90.8 | 70.1 | 80.2 | 49.2 | 48.7 | 49.2 |
| SEQ ID NO: 11 | | | | | | | | | |
| PtIP-83Ce | 75.7 | 79.8 | 77.8 | 90.7 | 70.5 | 80.9 | 49.3 | 48.8 | 48.9 |
| SEQ ID NO: 13 | | | | | | | | | |
| PtIP-83Cf | 77.4 | 87.1 | 84.8 | 71.4 | 60.5 | 61.8 | 49.3 | 48.9 | 52.8 |
| SEQ ID NO: 15 | | | | | | | | | |
| PtIP-83Cg | 97.2 | 79.6 | 77.4 | 69.1 | 59.3 | 60.4 | 49.5 | 49.4 | 50.5 |
| SEQ ID NO: 17 | | | | | | | | | |
| PtIP-83Ch-like | 77.6 | 84.9 | 82.6 | 72.5 | 62.5 | 62.9 | 50.6 | 50.6 | 52.5 |
| SEQ ID NO: 755 | | | | | | | | | |
| PtIP-83Ch | 77.6 | 84.9 | 82.6 | 72.5 | 62.5 | 62.9 | 50.6 | 50.7 | 52.5 |
| SEQ ID NO: 754 | | | | | | | | | |
| PtIP-83Ci-like | 99.9 | 79.0 | 76.8 | 68.1 | 58.9 | 59.9 | 49.9 | 49.8 | 49.3 |
| SEQ ID NO: 759 | | | | | | | | | |
| PtIP-83Ci | — | 79.1 | 76.9 | 68.2 | 59.1 | 59.9 | 50.1 | 49.9 | 49.4 |
| SEQ ID NO: 758 | | | | | | | | | |
| PtIP-83Cj-like | — | — | 97.0 | 71.7 | 61.1 | 62.7 | 50.7 | 50.7 | 51.5 |
| SEQ ID NO: 763 | | | | | | | | | |
| PtIP-83Cj | — | — | — | 69.7 | 61.6 | 60.7 | 50.3 | 50.3 | 50.4 |
| SEQ ID NO: 762 | | | | | | | | | |
| PtIP-83Da | — | — | — | — | 61.4 | 71.7 | 43.5 | 43.0 | 44.4 |
| SEQ ID NO: 19 | | | | | | | | | |
| PtIP-83Ea | — | — | — | — | — | 51.6 | 38.7 | 38.6 | 38.7 |
| SEQ ID NO: 21 | | | | | | | | | |
| PtIP-83Eb | — | — | — | — | — | — | 38.8 | 38.2 | 37.9 |
| SEQ ID NO: 23 | | | | | | | | | |
| PtIP-83Fa | — | — | — | — | — | — | — | 97.1 | 48.4 |
| SEQ ID NO: 3 | | | | | | | | | |
| PtIP-83Fb | — | — | — | — | — | — | — | — | 48.7 |
| SEQ ID NO: 716 | | | | | | | | | |
| PtIP-83Fd | — | — | — | — | — | — | — | — | — |
| SEQ ID NO: 756 | | | | | | | | | |
| PtIP-83Fe | — | — | — | — | — | — | — | — | — |
| SEQ ID NO: 757 | | | | | | | | | |
| PtIP-83Ff-like | — | — | — | — | — | — | — | — | — |
| SEQ ID NO: 761 | | | | | | | | | |
| PtIP-83Ff | — | — | — | — | — | — | — | — | — |
| SEQ ID NO: 760 | | | | | | | | | |
| PtIP-83Fg | — | — | — | — | — | — | — | — | — |
| SEQ ID NO: 766 | | | | | | | | | |
| PtIP-83Fh | — | — | — | — | — | — | — | — | — |
| SEQ ID NO: 767 | | | | | | | | | |
| PtIP-83Fi-like | — | — | — | — | — | — | — | — | — |
| SEQ ID NO: 769 | | | | | | | | | |
| PtIP-83Fi | — | — | — | — | — | — | — | — | — |
| SEQ ID NO: 768 | | | | | | | | | |
| PtIP-83Ga-like | — | — | — | — | — | — | — | — | — |
| SEQ ID NO: 765 | | | | | | | | | |

c

| | PtIP- | PtIP- | PtIP- | PtIP- | PtIP- | PtIP- | PtIP- | PtIP- | PtIP- |
|---|---|---|---|---|---|---|---|---|---|
| | 83Fe | 83Ff-like | 83Ff | 83Fg | 83Fh | 83Fi-like | 83Fi | 83Ga-like | 83Ga |
| | SEQ | SEQ | SEQ | SEQ | SEQ | SEQ | SEQ | SEQ | SEQ |
| | ID | ID | ID | ID | ID | ID | ID | ID | ID |
| | NO: | NO: | NO: | NO: | NO: | NO: | NO: | NO: | NO: |
| . | 757 | 761 | 760 | 766 | 767 | 769 | 768 | 765 | 764 |
| PtIP-83Aa | 51.0 | 51.1 | 50.8 | 49.8 | 47.3 | 50.2 | 50.2 | 34.5 | 34.6 |
| SEQ ID NO: 1 | | | | | | | | | |
| PtIP-83Ca | 49.0 | 49.2 | 49.2 | 47.8 | 45.6 | 47.4 | 47.4 | 35.0 | 35.1 |
| SEQ ID NO: 5 | | | | | | | | | |
| PtIP-83Cb | 50.5 | 51.0 | 51.0 | 48.0 | 47.3 | 47.4 | 47.4 | 34.5 | 34.6 |
| SEQ ID NO: 7 | | | | | | | | | |
| PtIP-83Cc | 49.2 | 49.7 | 49.7 | 48.1 | 46.0 | 47.6 | 47.6 | 35.0 | 35.1 |
| SEQ ID NO: 9 | | | | | | | | | |
| PtIP-83Cd | 49.3 | 49.8 | 49.8 | 48.2 | 46.1 | 47.7 | 47.7 | 35.1 | 35.2 |
| SEQ ID NO: 11 | | | | | | | | | |
| PtIP-83Ce | 49.0 | 49.5 | 49.5 | 48.2 | 46.0 | 47.7 | 47.7 | 35.0 | 35.1 |
| SEQ ID NO: 13 | | | | | | | | | |
| PtIP-83Cf | 52.5 | 51.5 | 51.5 | 49.7 | 48.3 | 49.3 | 49.3 | 35.5 | 35.6 |
| SEQ ID NO: 15 | | | | | | | | | |
| PtIP-83Cg | 50.7 | 50.4 | 50.4 | 47.8 | 46.9 | 47.2 | 47.2 | 34.5 | 34.6 |
| SEQ ID NO: 17 | | | | | | | | | |
| PtIP-83Ch-like | 52.4 | 51.5 | 51.6 | 49.7 | 48.4 | 49.4 | 49.4 | 34.6 | 34.7 |
| SEQ ID NO: 755 | | | | | | | | | |
| PtIP-83Ch | 52.4 | 51.5 | 51.6 | 49.7 | 48.1 | 49.7 | 49.7 | 34.7 | 34.8 |
| SEQ ID NO: 754 | | | | | | | | | |
| PtIP-83Ci-like | 49.9 | 50.9 | 50.5 | 47.9 | 47.0 | 47.6 | 47.6 | 34.6 | 34.7 |
| SEQ ID NO: 759 | | | | | | | | | |
| PtIP-83Ci | 50.1 | 51.0 | 50.7 | 48.0 | 47.1 | 47.7 | 47.7 | 34.5 | 34.6 |
| SEQ ID NO: 758 | | | | | | | | | |
| PtIP-83Cj-like | 51.5 | 51.5 | 51.5 | 49.3 | 46.7 | 49.2 | 49.2 | 35.2 | 35.3 |
| SEQ ID NO: 763 | | | | | | | | | |
| PtIP-83Cj | 50.4 | 50.2 | 50.2 | 48.9 | 46.1 | 48.8 | 48.8 | 34.8 | 34.9 |
| SEQ ID NO: 762 | | | | | | | | | |
| PtIP-83Da | 44.6 | 44.6 | 44.6 | 42.5 | 40.5 | 42.0 | 42.0 | 30.5 | 30.6 |
| SEQ ID NO: 19 | | | | | | | | | |
| PtIP-83Ea | 38.6 | 38.7 | 38.7 | 39.6 | 36.9 | 39.3 | 39.3 | 29.0 | 29.1 |
| SEQ ID NO: 21 | | | | | | | | | |
| PtIP-83Eb | 38.1 | 38.7 | 38.7 | 36.6 | 36.1 | 36.4 | 36.4 | 27.4 | 27.5 |
| SEQ ID NO: 23 | | | | | | | | | |
| PtIP-83Fa | 48.3 | 48.9 | 49.5 | 73.4 | 64.6 | 71.9 | 71.9 | 31.8 | 31.9 |
| SEQ ID NO: 3 | | | | | | | | | |
| PtIP-83Fb | 48.8 | 48.9 | 48.9 | 73.0 | 64.3 | 71.8 | 71.8 | 31.9 | 32.0 |
| SEQ ID NO: 716 | | | | | | | | | |
| PtIP-83Fd | 96.5 | 72.9 | 73.0 | 49.9 | 47.7 | 49.2 | 49.3 | 33.8 | 33.7 |
| SEQ ID NO: 756 | | | | | | | | | |
| PtIP-83Fe | — | 72.9 | 73.0 | 50.0 | 47.7 | 49.2 | 49.3 | 33.5 | 33.4 |
| SEQ ID NO: 757 | | | | | | | | | |
| PtIP-83Ff-like | — | — | 99.9 | 49.1 | 46.5 | 48.4 | 48.5 | 33.1 | 33.1 |
| SEQ ID NO: 761 | | | | | | | | | |
| PtIP-83Ff | — | — | — | 49.1 | 46.5 | 48.4 | 48.5 | 33.2 | 33.2 |
| SEQ ID NO: 760 | | | | | | | | | |
| PtIP-83Fg | — | — | — | — | 66.4 | 94.8 | 94.9 | 31.8 | 31.9 |
| SEQ ID NO: 766 | | | | | | | | | |
| PtIP-83Fh | — | — | — | — | — | 65.3 | 65.4 | 31.1 | 31.1 |
| SEQ ID NO: 767 | | | | | | | | | |
| PtIP-83Fi-like | — | — | — | — | — | — | 99.9 | 32.1 | 32.2 |
| SEQ ID NO: 769 | | | | | | | | | |
| PtIP-83Fi | — | — | — | — | — | — | — | 32.2 | 32.3 |
| SEQ ID NO: 768 | | | | | | | | | |
| PtIP-83Ga-like | — | — | — | — | — | — | — | — | 99.9 |
| SEQ ID NO: 765 | | | | | | | | | |

### Example 4: Transient Expression in Leaves and Insect Bioassay

[0479] To confirm activity of PtIP-83Aa (SEQ ID NO: 1) a transient expression system under control of a viral promoter pDMMV and/or AtUBQ10 (Day, et. al., (1999) Plant Mol. Biol. 40:771-782; Norris S R et al (1993) Plant Mol Biol. 21(5):895-906) was utilized. The agro-infiltration method of introducing an Agrobacterium cell suspension to plant cells of intact tissues so that reproducible infection and subsequent plant derived transgene expression may be measured or studied is well known in the art (Kapila, et. al., (1997) Plant Science 122:101-108). Briefly, the unifoliate stage of bush bean (common bean, Phaseolus vulgaris) or soybean (Glycine max), were agro-infiltrated with normalized bacterial cell cultures of test and control strains. After 4 to 7 days leaf disks were excised from each plantlet and infested with 2 neonates of Soybean Looper (SBL) (Chrysodeixis includens), 2 neonates of Corn Earworm (CEW) (Helicoverpa zea), 2 neonates of Fall Armyworm (Spodoptera frugiperda) or 4 neonates of European Corn Barer (ECB) (Ostrinia nubilalis) alone. Control leaf discs were generated with Agrobacterium containing only a DsRed2 fluorescence marker (Clontech™, 1290 Terra Bella Ave. Mountain View, CA 94043) expression vector. Leaf discs from non-infiltrated plants were included as a second control. The consumption of green leaf tissue was scored two (CEW, FAW) or three (ECB, SBL, FAW) days after infestation and given scores of 0 to 9. The transiently expressed PtIP-83Aa (SEQ ID NO: 1) protected leaf discs from consumption by the infested insects while total green tissue consumption was observed for the negative control and untreated tissue (Table 10). Transient protein expression of PtIP-83Aa (SEQ ID NO: 1) was confirmed by mass spectrometry-based protein identification using trypsinized protein extracts of infiltrated leaf tissues (Patterson, (1998) 10(22):1-24, Current Protocol in Molecular Biology published by John Wiley & Son Inc). Transient expression can be verified by using HA or EPEA tagged PtIP-83 polypeptides by western analysis of the HA or EPEA tags.

TABLE 10

| | |
|---|---|
| Transient | Leaf Disc Consumption (Scale 1 to 9) |

| expression | FAW | CEW | SBL | ECB |
|---|---|---|---|---|
| PtIP-83Aa | 8.3 | 8.3 | 8.6 | 8.9 |

| Value | Description |
|---|---|
| 1 | leaf disk is greater than 90% consumed |
| 2 | leaf disk is 70-80% consumed |
| 3 | leaf disk is 60-70% consumed |
| 4 | leaf disk is 50-60% consumed |
| 5 | leaf disk is 40-50% consumed |
| 6 | leaf disk is less than 30% consumed |
| 7 | leaf disk is less than 10% consumed |
| 8 | leaf disk has only a few pinholes |
| 9 | leaf disk is untouched by the insect |

[0480] Activity of PtIP-83Fa (SEQ ID NO: 4) was validated using the bush bean transient expression system and found to be comparable to PtIP-83Aa (SEQ ID NO: 2). PtIP-83Fa (SEQ ID NO: 4) showed a similar insecticidal activity spectrum except for lacking activity against FAW (Table 11).

TABLE 11

| | |
|---|---|
| Transient | Leaf Disc Consumption (Scale 1 to 9) |

| experiment | FAW | CEW | SBL | ECB |
|---|---|---|---|---|
| PtIP-83Fa | 1.0 | 6.8 | 8.1 | 7.4 |
| Vector control | 1.7 | 2.3 | 1.1 | 1.8 |
| blank | 1.0 | 1.1 | 1.4 | 1.0 |

[0481] Activity of PtIP-83Ca (SEQ ID NO: 5), PtIP-83Cb (SEQ ID NO: 7), PtIP-83Cc (SEQ ID NO: 9), PtIP-83Cd (SEQ ID NO: 11), PtIP-83Ce (SEQ ID NO: 13), PtIP-83Cf (SEQ ID NO: 15), PtIP-83Cg (SEQ ID NO: 17), PtIP-83 Da (SEQ ID NO: 19), PtIP-83Ea (SEQ ID NO: 21), PtIP-83Eb (SEQ ID NO: 23), PtIP-83Fb (SEQ ID NO: 716), PtIP-83Ch (SEQ ID NO: 754), PtIP-83Ch-like (SEQ ID NO: 755), PtIP-83Fd (SEQ ID NO: 756), PtIP-83Fe (SEQ ID NO: 757), PtIP-83Ci (SEQ ID NO: 758), PtIP-83Ci-like (SEQ ID NO: 759), PtIP-83Ff (SEQ ID NO: 760), and PtIP-83Ff-like (SEQ ID NO: 761) were also validated using a bush bean transient expression system. The activity spectra for all PtIP-83 homologs are summarized in Table 12, where a “+” indicates an average activity score of <=60% of leaf disc consumed, and a “−” indicates an average activity score of .>=60% leaf disc consumed.

TABLE 12

| | FAW | CEW | SBL | ECB | | FAW | CEW | SBL | ECB |
|---|---|---|---|---|---|---|---|---|---|
| PtIP-83Aa | + | + | + | + | PtIP-83Ch | − | − | − | + |
| PtIP-83Ca | − | + | + | + | PtIP-83Ch-like | − | − | − | + |
| PtIP-83Cb | + | + | + | − | PtIP-83Fd | − | − | + | − |
| PtIP-83Cc | + | + | + | + | PtIP-83Fe | − | − | − | − |
| PtIP-83Cd | + | + | + | + | PtIP-83Ci | + | + | + | + |
| PtIP-83Ce | − | + | + | + | PtIP-83Ci-like | + | + | + | + |
| PtIP-83Cf | − | − | + | − | PtIP-83Ff | − | − | − | − |
| PtIP-83Cg | + | + | + | + | PtIP-83Ff-like | + | − | + | + |

| | | | | | | |
|---|---|---|---|---|---|---|
| PtIP-83Da | − | − | − | − | PtIP-83Cj | not tested |
| PtIP-83Ea | − | − | − | + | PtIP-83Cj-like | not tested |
| PtIP-83Eb | − | − | − | − | PtIP-83Ga | not tested |
| PtIP-83Fa | − | + | + | + | PtIP-83Ga-like | not tested |
| PtIP-83Fb | | + | + | + | PtIP-83Fg | not tested |
| | | | | | PtIP-83Fh | not tested |
| | | | | | PtIP-83Fi | not tested |
| | | | | | PtIP-83Fi-like | not tested |

### Example 5: Baculovirus Expression of PtIP-83A Polypeptides

[0482] The gene encoding PtIP-83Aa SEQ ID NO: 2 was subcloned into the pFastBac™ Dual vector (Invitrogen®) with the stop codon removed for C-terminal translation of a 10×-histidine tag addition (SEQ ID NO: 27) and the sequence of the histidine-tagged PtIP-83Aa polypeptide is set forth as SEQ ID NO: 2. This vector was transformed into DH10Bac cells to generate baculovirus. These baculovirus were used to infect sf9 insect cells and incubated for 72 hours at 27° C. The infected insect cells were harvested by centrifugation. The cell culture pellet was suspended with 100 mL of lysis buffer (1×PBS, 10% glycerol, with protease inhibitor and benzonase) and incubated at 4° C. for 5 min with stirring, then homogenizing twice. The lysate was centrifuged at 16000 rpm for 20 min. The supernatant was saved and loaded onto two 2 mL Ni-NTA Hi-Bind Resin (Novagen, cat #70666) columns pre-equilibrated with Elute buffer (1×PBS, 10% glycerol). The columns were then sequentially eluted with 10 mL of Elute buffer containing 10, 20, 50, and 250 mM of imidazole. Samples were analyzed by SDS-PAGE. The purified fractions (E250) were concentrated using 100K Amicon® Ultra Centrifugal Filters (Millipore) to ˜0.5 mg/mL and demonstrated insecticidal activity against CEW, ECB, FAW and SBL similar to the activity spectrum obtained using transient expressing leaf discs.

### Example 6: Agrobacterium-Mediated Transformation of Maize and Regeneration of Transgenic Plants

[0483] For Agrobacterium-mediated transformation of maize with PtIP-83 nucleotide sequences such as PtIP-83Aa (SEQ ID NO: 2), PtIP-83Aa ModA (codon optimized) (SEQ ID NO: 28), and PtIP-83Aa ModB (codon optimized (SEQ ID NO: 29), the method of Zhao can be used (U.S. Pat. No. 5,981,840 and PCT Patent Publication Number WO 1998/32326; the contents of which are hereby incorporated by reference). Briefly, immature embryos were isolated from maize and the embryos contacted with a suspension of Agrobacterium under conditions whereby the bacteria are capable of transferring the nucleotide sequence (PtIP-83Aa SEQ ID NO: 2, PtIP-83Aa ModA (codon optimized)—SEQ ID NO: 28, and PtIP-83Aa ModB (codon optimized—SEQ ID NO: 29) to at least one cell of at least one of the immature embryos (step 1: the infection step). In this step the immature embryos can be immersed in an Agrobacterium suspension for the initiation of inoculation. The embryos were co-cultured for a time with the Agrobacterium (step 2: the co-cultivation step). The immature embryos can be cultured on solid medium following the infection step. Following this co-cultivation period an optional “resting” step is contemplated. In this resting step, the embryos were incubated in the presence of at least one antibiotic known to inhibit the growth of Agrobacterium without the addition of a selective agent for plant transformation (step 3: resting step). The immature embryos were cultured on solid medium with antibiotic, but without a selecting agent, for elimination of Agrobacterium and for a resting phase for the infected cells. Next, inoculated embryos were cultured on medium containing a selective agent and growing transformed callus is recovered (step 4: the selection step). The immature embryos were cultured on solid medium with a selective agent resulting in the selective growth of transformed cells. The callus was then regenerated into plants (step 5: the regeneration step), and calli grown on selective medium were cultured on solid medium to regenerate the plants.

### Example 7: Transformation and Regeneration of Soybean (Glycine max)

[0484] Transgenic soybean lines are generated by the method of particle gun bombardment (Klein et al., Nature (London) 327:70-73 (1987); U.S. Pat. No. 4,945,050) using a BIORAD Biolistic PDS1000/He instrument and either plasmid or fragment DNA. The following stock solutions and media are used for transformation and regeneration of soybean plants:

### Stock Solutions:

### Sulfate 100× Stock:

[0485] 37.0 g MgSO₄·7H₂O, 1.69 g MnSO₄·H₂O, 0.86 g ZnSO₄·7H₂O, 0.0025 g CuSO₄·5H₂O

### Halides 100× Stock:

[0486] 30.0 g CaCl₂·2H₂O, 0.083 g KI, 0.0025 g CoCl₂·6H₂O

### P, B, Mo 100× Stock:

[0487] 18.5 g KH₂PO₄, 0.62 g H₃BO₃, 0.025 g Na₂MoO₄·2H₂O

### Fe EDTA 100× Stock:

[0488] 3.724 g Na₂EDTA, 2.784 g FeSO₄·7H₂=O

### 2,4-D Stock:

[0489] 10 mg/mL Vitamin

### B5 Vitamins, 1000× Stock:

[0490] 100.0 g myo-inositol, 1.0 g nicotinic acid, 1.0 g pyridoxine HCl, 10 g thiamine.HCL.

### Media (per Liter):

### SB199 Solid Medium:

1 package MS salts (Gibco/BRL—Cat. No. 11117-066), 1 mL B5 vitamins 1000× stock, 30 g Sucrose, 4 ml 2, 4-D (40 mg/L final concentration), pH 7.0, 2 gm Gelrite

### SB1 Solid Medium:

1 package MS salts (Gibco/BRL—Cat. No. 11117-066), 1 mL B5 vitamins 1000× stock, 31.5 g Glucose, 2 mL 2, 4-D (20 mg/L final concentration), pH 5.7, 8 g TC agar

### SB196:

10 mL of each of the above stock solutions 1-4, 1 mL B5 Vitamin stock, 0.463 g (NH4)2 SO4, 2.83 g KNO3, 1 mL 2,4 D stock, 1 g asparagine, 10 g Sucrose, pH 5.7

### SB71-4:

Gamborg's B5 salts, 20 g sucrose, 5 g TC agar, pH 5.7.

### SB103:

1 pk. Murashige & Skoog salts mixture, 1 mL B5 Vitamin stock, 750 mg MgCl2 hexahydrate, 60 g maltose, 2 g Gelrite™, pH 5.7.

### SB166:

SB103 supplemented with 5 g per liter activated charcoal.

### Soybean Embrvoaenic Suspension Culture Initiation:

[0491] Pods with immature seeds from available soybean plants 45-55 days after planting are picked, removed from their shells and placed into a sterilized magenta box. The soybean seeds are sterilized by shaking them for 15 min in a 5% Clorox® solution with 1 drop of Ivory™ soap (i.e., 95 mL of autoclaved distilled water plus 5 mL Clorox® and 1 drop of soap, mixed well). Seeds are rinsed using 2 L sterile distilled water and those less than 3 mm are placed on individual microscope slides. The small end of the seed is cut and the cotyledons pressed out of the seed coat. Cotyledons are transferred to plates containing SB199 medium (25-30 cotyledons per plate) for 2 weeks, then transferred to SB1 for 2-4 weeks. Plates are wrapped with fiber tape. After this time, secondary embryos are cut and placed into SB196 liquid medium for 7 days.

### Culture Conditions:

[0492] Soy bean embryogenic suspension cultures (cv. 93Y21) were maintained in 50 mL liquid medium SB196 on a rotary shaker, 100-150 rpm, 26° C. on 16:8 h day/night photoperiod at light intensity of 80-100 μE/m2/s. Cultures are subcultured every 7-14 days by inoculating up to ½ dime size quantity of tissue (clumps bulked together) into 50 mL of fresh liquid SB196.

### Preparation of DNA for Bombardment:

[0493] In particle gun bombardment procedures it is possible to use purified 1) entire plasmid DNA; or 2) DNA fragments containing only the recombinant DNA expression cassette(s) of interest. For every seventeen bombardment transformations, 85 μL of suspension is prepared containing 1 to 90 picograms (pg) of plasmid DNA per base pair of each DNA plasmid. DNA plasmids or fragments are co-precipitated onto gold particles as follows. The DNAs in suspension are added to 50 μL of a 10-60 mg/mL 0.6 μm gold particle suspension and then combined with 50 μL CaCl2 (2.5 M) and 20 μL spermidine (0.1 M). The mixture is vortexed for 5 sec, spun in a microfuge for 5 sec, and the supernatant removed. The DNA-coated particles are then washed once with 150 μL of 100% ethanol, vortexed and spun in a microfuge again, then resuspended in 85 μL of anhydrous ethanol. Five μL of the DNA-coated gold particles are then loaded on each macrocarrier disc.

Tissue Preparation and Bombardment with DNA:

[0494] Approximately 100 mg of two-week-old suspension culture is placed in an empty 60 mm×15 mm petri plate and the residual liquid removed from the tissue using a pipette. The tissue is placed about 3.5 inches away from the retaining screen and each plate of tissue is bombarded once. Membrane rupture pressure is set at 650 psi and the chamber is evacuated to −28 inches of Hg. Following bombardment, the tissue from each plate is divided between two flasks, placed back into liquid media, and cultured as described above.

### Selection of Transformed Embryos and Plant Regeneration:

[0495] After bombardment, tissue from each bombarded plate is divided and placed into two flasks of SB196 liquid culture maintenance medium per plate of bombarded tissue. Seven days post bombardment, the liquid medium in each flask is replaced with fresh SB196 culture maintenance medium supplemented with 100 ng/ml selective agent (selection medium). For selection of transformed soybean cells the selective agent used can be a sulfonylurea (SU) compound with the chemical name, 2-chloro-N-((4-methoxy-6 methy-1,3,5-triazine-2-yl)aminocarbonyl) benzenesulfonamide (common names: DPX-W4189 and chlorsulfuron). Chlorsulfuron is the active ingredient in the DuPont sulfonylurea herbicide, GLEAN®. The selection medium containing SU is replaced every two weeks for 8 weeks. After the 8 week selection period, islands of green, transformed tissue are observed growing from untransformed, necrotic embryogenic clusters. These putative transgenic events are isolated and kept in SB196 liquid medium with SU at 100 ng/ml for another 5 weeks with media changes every 1-2 weeks to generate new, clonally propagated, transformed embryogenic suspension cultures. Embryos spend a total of around 13 weeks in contact with SU. Suspension cultures are subcultured and maintained as clusters of immature embryos and also regenerated into whole plants by maturation and germination of individual somatic embryos.

[0496] Somatic embryos became suitable for germination after four weeks on maturation medium (1 week on SB166 followed by 3 weeks on SB103). They are then removed from the maturation medium and dried in empty petri dishes for up to seven days. The dried embryos are then planted in SB71-4 medium where they are allowed to germinate under the same light and temperature conditions as described above. Germinated embryos are transferred to potting medium and grown to maturity for seed production.

### Example 8—Particle bombardment Transformation and Regeneration of Transgenic Plants

[0497] Immature maize embryos from greenhouse donor plants are bombarded with a plasmid containing a nucleotide sequence encoding the insecticidal protein. The ears are husked and surface sterilized in 30% Clorox® bleach plus 0.5% Micro detergent for 20 minutes and rinsed two times with sterile water. The immature embryos are excised and placed embryo axis side down (scutellum side up), 25 embryos per plate, on 560Y medium for 4 hours and then aligned within the 2.5 cm target zone in preparation for bombardment. A plasmid vector DNA comprising the nucleotide sequence encoding the insecticidal protein operably linked to a promoter is precipitated onto 1.1 μm (average diameter) tungsten pellets using a CaCl2 precipitation procedure as follows: 100 μl prepared tungsten particles in water; 10 μl (1 μg) DNA in Tris EDTA buffer (1 μg total DNA); 100 μl 2.5 M CaCl2 and 10 μl 0.1 M spermidine.

[0498] Each reagent is added sequentially to the tungsten particle suspension, while maintained on the multitube vortexer. The final mixture is sonicated briefly and allowed to incubate under constant vortexing for 10 minutes. After the precipitation period, the tubes are centrifuged briefly, liquid removed, washed with 500 ml 100% ethanol and centrifuged for 30 seconds. Again the liquid is removed, and 105 μl 100% ethanol is added to the final tungsten particle pellet. For particle gun bombardment, the tungsten/DNA particles are briefly sonicated and 10 μl spotted onto the center of each macrocarrier and allowed to dry about 2 minutes before bombardment. The sample plates are bombarded at level #4 in a particle gun. All samples receive a single shot at 650 PSI, with a total of ten aliquots taken from each tube of prepared particles/DNA

[0499] Following bombardment, the embryos are kept on 560Y medium for 2 days, then transferred to 560R selection medium containing 3 mg/liter Bialaphos, and subcultured every 2 weeks. After approximately 10 weeks of selection, selection-resistant callus clones are transferred to 288J medium to initiate plant regeneration. Following somatic embryo maturation (2-4 weeks), well-developed somatic embryos are transferred to medium for germination and transferred to the lighted culture room. Approximately 7-10 days later, developing plantlets are transferred to 272V hormone-free medium in tubes for 7-10 days until plantlets are well established. Plants are then transferred to inserts in flats (equivalent to 2.5″ pot) containing potting soil and grown for 1 week in a growth chamber, subsequently grown an additional 1-2 weeks in the greenhouse, then transferred to classic 600 pots (1.6 gallon) and grown to maturity. Plants are monitored and scored for expression of a PtIP-83 polypeptide by assays known in the art, such as, for example, immunoassays and Western blotting.

[0500] Transgenic maize plants positive for expression of the insecticidal proteins are tested for pesticidal activity using standard bioassays known in the art. Such methods include, for example, root excision bioassays and whole plant bioassays. See, e.g., US Patent Application Publication Number US 2003/0120054 and International Publication Number WO 2003/018810.

[0501] Bombardment medium (560Y) comprises 4.0 g/l N6 basal salts (SIGMA C-1416), 1.0 ml/l Eriksson's Vitamin Mix (1000.times.SIGMA-1511), 0.5 mg/l thiamine HCl, 120.0 g/l sucrose, 1.0 mg/l 2,4-D and 2.88 g/l L-proline (brought to volume with D-I H2O following adjustment to pH 5.8 with KOH); 2.0 g/l Gelrite (added after bringing to volume with D-I H2O) and 8.5 mg/l silver nitrate (added after sterilizing the medium and cooling to room temperature). Selection medium (560R) comprises 4.0 g/l N6 basal salts (SIGMA C-1416), 1.0 ml/l Eriksson's Vitamin Mix (1000.times.SIGMA-1511), 0.5 mg/I thiamine HCl, 30.0 g/l sucrose and 2.0 mg/l 2,4-D (brought to volume with D-I H2O following adjustment to pH 5.8 with KOH); 3.0 g/l Gelrite (added after bringing to volume with D-I H2O) and 0.85 mg/l silver nitrate and 3.0 mg/l bialaphos (both added after sterilizing the medium and cooling to room temperature).

[0502] Plant regeneration medium (288J) comprises 4.3 g/l MS salts (GIBCO 11117-074), 5.0 ml/l MS vitamins stock solution (0.100 g nicotinic acid, 0.02 g/l thiamine HCL, 0.10 g/l pyridoxine HCL, and 0.40 g/l glycine brought to volume with polished D-I H2O) (Murashige and Skoog, (1962) Physiol. Plant. 15:473), 100 mg/l myo-inositol, 0.5 mg/I zeatin, 60 g/l sucrose and 1.0 ml/l of 0.1 mM abscisic acid (brought to volume with polished D-I H2O after adjusting to pH 5.6); 3.0 g/l Gelrite (added after bringing to volume with D-I H2O) and 1.0 mg/l indoleacetic acid and 3.0 mg/l bialaphos (added after sterilizing the medium and cooling to 60° C.). Hormone-free medium (272V) comprises 4.3 g/l MS salts (GIBCO 11117-074), 5.0 ml/l MS vitamins stock solution (0.100 g/l nicotinic acid, 0.02 g/l thiamine HCL, 0.10 g/l pyridoxine HCL and 0.40 g/I glycine brought to volume with polished D-I H2O), 0.1 g/l myo-inositol and 40.0 g/I sucrose (brought to volume with polished D-I H2O after adjusting pH to 5.6) and 6 g/I bacto-agar (added after bringing to volume with polished D-I H2O), sterilized and cooled to 60° C.

### Example 9. Insect Control Efficacy of Stable Transformed Soybean and Corn Plants Against Broad Spectrum of Lepidopteran Insects

[0503] Leaf discs are excised from the transformed plants and tested for insecticidal activity of PtIP-83 polypeptides against the Soy Bean Looper (SBL) (Chrysodeixis includens), Corn Earworm, (CEW) (Helicoverpa zea), European Corn Borer (ECB) (Ostrinia nubilalis), Velvet Bean Caterpillar (VBC) (Anticarsia gemmatalis) and Fall Armyworm (Spodoptera frugiperda).

### Example 10. Chimeras Between PtIP-83Aa (SEQ ID NO: 1) and PtIP-50Aa (SEQ ID NO: 34)

[0504] To generate single component active variants with diversified sequences, chimeras between PtIP-83Aa (SEQ ID NO: 1) and PtIP50Aa (SEQ ID NO: 34) were generated by multi-PCR fragments overlap assembly (Gibson Assembly Cloning Kit, New England Biolabs Inc.). A total of 6 chimeras were constructed: Table 13 shows the crossover points and the % sequence identity to PtIP-83Aa (SEQ ID NO: 1).

TABLE 13

| | | | | % Seq. | Soybean |
|---|---|---|---|---|---|
| Chimera | | Beginning | Ending | iden. to | looper |
| Designation | polynucleotide | crossover | crossover | PtIP-83Aa | active |
| Chimera 1 | SEQ ID | Q334 | S473 | 94 | No |
| SEQ ID NO: 640 | NO: 634 | | | | |
| Chimera 2 | SEQ ID | G469 | N615 | 95 | No |
| SEQ ID NO: 641 | NO: 635 | | | | |
| Chimera 3 | SEQ ID | P610 | E713 | 95 | Yes |
| SEQ ID NO: 642 | NO: 636 | | | | |
| Chimera 4 | SEQ ID | P754 | E873 | 94 | No |
| SEQ ID NO: 643 | NO: 637 | | | | |
| Chimera 5 | SEQ ID | F823 | E873 | 98 | Yes |
| SEQ ID NO: 644 | NO: 638 | | | | |
| Chimera 6 | SEQ ID | Q334 | E713 | 85 | No |
| SEQ ID NO: 645 | NO: 639 | | | | |

Crossover position numbers are based on the alignment shown in FIG. 3

[0505] The chimera genes were cloned into a plant transient expression vector and SBL activity assays were performed as described in Example 4.

### Example 11—Identification of Motifs Affecting the Protein Function of PtIP-83Aa

[0506] To identify sequence space affecting protein structural stability and insecticidal function of PtIP-83Aa, five unique motifs were identified by amino acid alignment among PtIP-83Aa, PtIP-50Aa (SEQ ID NO: 34), PtIP-50Ba (SEQ ID NO: 35), PtIP-50Bb (SEQ ID NO: 36), and PtIP-83Fa (SEQ ID NO: 3) (FIG. 4a-4d). Three conserved motifs: amino acids V53-P66 of SEQ ID NO: 1 were defined as Motif A, amino acids Q363-N373 of SEQ ID NO: 1 as Motif B and amino acids W556-A564 of SEQ ID NO: 1 as Motif C. Another two variable motifs were also picked: amino acids L646-W655 of SEQ ID NO: 1 as Motif D and amino acids R771-Y786 of SEQ ID NO: 1 as Motif E. Saturation mutagenesis primers were designed for these five motifs as shown in Table 14, Table 15, Table 16, Table 17 and Table 18. Saturation mutagenesis was performed using Agilent's QuikChange® Lightning Site-Directed Mutagenesis Kit. Mutations were introduced by amplifying a plant expression vector containing the polynucleotide of SEQ ID NO: 2 encoding the PtIP-83Aa polypeptide (SEQ ID NO: 1) using complementing forward and reverse primers containing a NNK degenerate codon at the targeted position. Amino acid substitutions at each targeted position were identified by DNA sequencing. Plant transient expression and SBL activity assays were performed as described in example 4. The amino acid substitutions identified in Motif A, Motif B, Motif C, Motif D, and Motif E of PtIP-83Aa (SEQ ID NO: 1) and the amino acid substitutions with insecticidal activity are shown in Table 14, Table 15, Table 16, Table 17 and Table 18 respectively.

TABLE 14

| Position | Oligo name | Primer | Identified substitutions | Active substitutions † |
|---|---|---|---|---|
| V53 | 083SM-V53-F | SEQ ID NO: 38 | A, C, D, E, F, G, H, K, L, N, P, Q, R, | A, C, T |
| | | | S, T, Y | |
| K54 | 083SM-K54-F | SEQ ID NO: 39 | A, C, D, E, F, G, H, I, L, M, N, P, Q, | A, C, D, E, G, H, I, L, M, N, Q, R, |
| | 083SM-K54-R | SEQ ID NO: 40 | R, S, T, V, W, Y | S, T |
| R55 | 083SM-R55-F | SEQ ID NO: 41 | A, D, E, F, G, H, K, L, M, N, P, Q, S, | A, D, E, F, G, H, K, L, M, N, Q, S, |
| | 083SM-R55-R | SEQ ID NO: 42 | T, V, W, Y | T, V, W, Y |
| L56 | 083SM-L56-F | SEQ ID NO: 43 | A, D, E, F, G, I, M, N, P, Q, R, S, T, | E, F, I, M, T, V |
| | 083SM-L56-R | SEQ ID NO: 44 | V, W, Y | |
| Y57 | 083SM-Y57-F | SEQ ID NO: 45 | A, C, D, E, G, H, I, K, L, M, N, P, Q, | C, I, L, M, T, V |
| | 083SM-Y57-R | SEQ ID NO: 46 | R, S, T, V | |
| V58 | 083SM-V58-F | SEQ ID NO: 47 | A, C, D, F, G, H, I, K, L, N, P, Q, R, | C, I, L |
| | 083SM-V58-R | SEQ ID NO: 48 | S, T, W, Y | |
| F59 | 083SM-F59-F | SEQ ID NO: 49 | A, C, D, E, G, H, I, K, L, M, N, P, Q, | L, M, V, Y |
| | 083SM-F59-R | SEQ ID NO: 50 | R, S, T, V, Y | |
| A60 | 083SM-A60-F | SEQ ID NO: 51 | C, D, E, F, G, H, I, L, M, N, P, Q, R, | C, G, S, T, V |
| | 083SM-A60-R | SEQ ID NO: 52 | S, T, V, Y | |
| D61 | 083SM-D61-F | SEQ ID NO: 53 | C, E, F, G, H, I, K, L, N, P, Q, R, S, | E, H, S |
| | 083SM-D61-R | SEQ ID NO: 54 | T, V, W, Y | |
| V62 | 083SM-V62-F | SEQ ID NO: 55 | A, C, D, E, F, G, H, I, K, L, M, N, P, | A, C, I, L, T |
| | 083SM-V62-R | SEQ ID NO: 56 | R, S, T, Y | |
| V63 | 083SM-V63-F | SEQ ID NO: 57 | A, C, G, H, I, K, L, M, N, P, Q, R, S, | A, C, I, L, M, T |
| | 083SM-V63-R | SEQ ID NO: 58 | T, W, Y | |
| E64 | 083SM-E64-F | SEQ ID NO: 59 | A, C, F, G, H, I, L, M, N, P, Q, R, S, | A, C, F, G, H, I, L, M, N, Q, R, S, |
| | 083SM-E64-R | SEQ ID NO: 60 | T, V, W, Y | T, V, W, Y |
| L65 | 083SM-L65-F | SEQ ID NO: 61 | A, C, D, F, G, H, I, M, N, P, Q, R, S, | A, C, F, H, I, M, N, Q, T, V, W |
| | 083SM-L65-R | SEQ ID NO: 62 | T, V, W, Y | |
| P66 | 083SM-P66-F | SEQ ID NO: 63 | A, C, D, E, F, G, I, K, L, M, N, Q, R, | D, G, M, Q, R |
| | 083SM-P66-R | SEQ ID NO: 64 | S, T, V, W, Y | |

† Active substitutions: average activity score <=60% of leaf disk eaten

TABLE 15

| Position | Oligo name | Primer sequence | Identified substitutions | Active substitutions |
|---|---|---|---|---|
| Q363 | 083SM-Q363-F | SEQ ID NO: 65 | A, C, E, F, G, H, K, L, N, P, R, S, T, V, | A, C, E, F, G, H, K, L, N, R, S, T, |
| | 083SM-Q363-R | SEQ ID NO: 66 | W | V, W |
| I364 | 083SM-I364-F | SEQ ID NO: 67 | A, C, D, E, F, G, H, K, L, M, N, P, Q, R, | A, C, E, F, H, K, L, M, N, Q, S, T, |
| | 083SM-I364-R | SEQ ID NO: 68 | S, T, V, W, Y | V, W, Y |
| L365 | 083SM-L365-F | SEQ ID NO: 69 | A, E, F, G, H, I, K, M, N, P, R, S, T, V, | A, E, F, G, H, I, K, M, N, R, V, W, |
| | 083SM-L365-R | SEQ ID NO: 70 | W, Y | Y |
| G366 | 083SM-G366-F | SEQ ID NO: 71 | A, C, E, F, H, I, K, L, M, N, P, R, S, T, | A, C, F, H, I, K, L, M, N, S, T, V |
| | 083SM-G366-R | SEQ ID NO: 72 | V, W | |
| S367 | 083SM-S367-F | SEQ ID NO: 73 | A, C, D, E, F, G, H, I, L, M, N, P, Q, R, | A, C, D, E, F, G, H, I, L, M, N, P, |
| | 083SM-S367-R | SEQ ID NO: 74 | T, V, W | Q, R, T, V, W |
| Y368 | 083SM-Y368-F | SEQ ID NO: 75 | A, C, D, E, F, G, H, I, K, L, M, N, P, Q, | A, C, D, E, F, G, H, I, K, L, M, N, |
| | 083SM-Y368-R | SEQ ID NO: 76 | R, S, T, V, W | P, Q, R, S, T, V, W |
| L369 | 083SM-L369-F | SEQ ID NO: 77 | A, C, D, F, G, H, I, M, N, P, R, S, T, V | A, C, D, F, G, I, M, T, V |
| | 083SM-L369-R | SEQ ID NO: 78 | | |
| L370 | 083SM-L370-F | SEQ ID NO: 79 | A, C, D, E, F, G, H, I, K, M, N, P, Q, R, | A, C, D, E, F, G, H, I, K, M, Q, R, |
| | 083SM-L370-R | SEQ ID NO: 80 | S, T, V, W, Y | S, T, V, W, Y |
| Q371 | 083SM-Q371-F | SEQ ID NO: 81 | A, C, D, E, F, G, I, K, L, N, R, S, T, V, | A, C, D, E, F, G, I, K, L, N, R, S, |
| | 083SM-Q371-R | SEQ ID NO: 82 | W | T, V, W |
| Q372 | 083SM-Q372-F | SEQ ID NO: 83 | A, C, D, F, G, H, I, L, N, R, S, T, V, Y | A, C, D, F, G, H, I, L, N, R, S, V, |
| | 083SM-Q372-R | SEQ ID NO: 84 | | Y |
| N373 | 083SM-N373-F | SEQ ID NO: 85 | A, C, D, F, G, H, I, K, L, M, P, Q, R, S, | A, C, D, F, G, H, I, K, Q, S, T, V, |
| | 083SM-N373-R | SEQ ID NO: 86 | T, V, W, Y | W |

TABLE 16

| Position | Oligo name | Primer Sequence | Identified substitutions | Active substitutions |
|---|---|---|---|---|
| W556 | 083SM-W556-F | SEQ ID NO: 87 | A, C, D, F, G, I, K, L, M, N, P, Q, R, S, | F, T, Y |
| | 083SM-W556-R | SEQ ID NO: 88 | T, V, Y | |
| R557 | 083SM-R557-F | SEQ ID NO: 89 | C, D, G, H, I, K, L, M, N, P, Q, S, T, V, | C, D, G, H, I, K, L, M, N, P, Q, S, |
| | 083SM-R557-R | SEQ ID NO: 90 | W, Y | T, V, W, Y |
| A558 | 083SM-A558-F | SEQ ID NO: 91 | C, D, F, G, H, I, K, L, N, P, Q, R, S, V, | C, D, F, G, H, I, K, L, N, P, Q, R, |
| | 083SM-A558-R | SEQ ID NO: 92 | W, Y | S, V, W, Y |
| K559 | 083SM-K559-F | SEQ ID NO: 93 | A, C, F, G, H, I, L, N, P, Q, R, S, T, V, | A, C, F, G, H, I, L, N, Q, R, S, T, |
| | 083SM-K559-R | SEQ ID NO: 94 | Y | V, Y |
| C560 | 083SM-C560-F | SEQ ID NO: 95 | A, D, F, G, H, I, K, L, M, N, P, Q, R, S, | A, F, G, I, M, N, R, S, T, V |
| | 083SM-C560-R | SEQ ID NO: 96 | T, V, Y | |
| K561 | 083SM-K561-F | SEQ ID NO: 97 | A, C, D, E, F, G, H, I, L, M, N, P, R, S, | A, C, D, E, F, G, H, I, L, M, N, R, |
| | 083SM-K561-R | SEQ ID NO: 98 | T, V, Y | S, T, V, Y |
| N562 | 083SM-N562-F | SEQ ID NO: 99 | A, C, D, E, F, G, H, K, L, M, P, R, S, T, | C, D, E, G, H, L, M, R, S, T, V, Y |
| | 083SM-N562-R | SEQ ID NO: 100 | V, W, Y | |
| V563 | 083SM-V563-F | SEQ ID NO: 101 | A, C, D, F, G, H, I, K, L, M, N, P, Q, R, | A, C, D, F, H, I, L, M, N, Q, T, W |
| | 083SM-V563-R | SEQ ID NO: 102 | S, T, W | |
| A564 | 083SM-A564-F | SEQ ID NO: 103 | C, D, F, G, H, I, K, L, M, N, P, Q, R, S, | C, G, M, Q, S, T, V, W, Y |
| | 083SM-A564-R | SEQ ID NO: 104 | T, V, W, Y | |

TABLE 17

| Position | Oligo name | Oligo Sequence | Identified substitutions | Active substitutions |
|---|---|---|---|---|
| L646 | 083SM-L646-F | SEQ ID NO: 105 | A, C, D, E, F, G, H, I, K, M, N, P, Q, R, | A, C, G, I, M, N, Q, S, T, V |
| | 083SM-L646-R | SEQ ID NO: 106 | S, T, V, W, Y | |
| L647 | 083SM-L647-F | SEQ ID NO: 107 | A, D, F, G, H, I, K, M, N, P, Q, R, S, T, | D, G, M, N, Q, T |
| | 083SM-L647-R | SEQ ID NO: 108 | V, W, Y | |
| M648 | 083SM-M648-F | SEQ ID NO: 109 | A, C, D, E, F, G, H, K, L, N, P, Q, R, S, | A, C, D, E, F, G, H, K, L, N, P, Q, |
| | 083SM-M648-R | SEQ ID NO: 110 | T, V, W, Y | R, S, T, V, W, Y |
| P649 | 083SM-P649-F | SEQ ID NO: 111 | A, C, D, E, F, G, H, I, K, L, M, N, Q, R, | A, C, D, E, F, G, H, K, M, N, Q, R, |
| | 083SM-P649-R | SEQ ID NO: 112 | S, T, V, W, Y | S, T, W, Y |
| T650 | 083SM-T650-F | SEQ ID NO: 113 | A, C, D, F, G, H, I, K, L, M, P, Q, R, S, | A, C, D, F, G, H, I, K, L, M, P, Q, |
| | 083SM-T650-R | SEQ ID NO: 114 | V, Y | R, S, V, Y |
| E651 | 083SM-E651-F | SEQ ID NO: 115 | A, C, D, G, H, I, K, L, M, N, P, Q, R, S, | A, C, D, G, H, I, L, M, N, P, Q, R |
| | 083SM-E651-R | SEQ ID NO: 116 | T, V, W, Y | S, T, V, Y |
| L652 | 083SM-L652-F | SEQ ID NO: 117 | A, C, D, E, F, G, H, I, K, M, N, P, Q, R, | C, F, I, K, M, P, R, S, T, V |
| | 083SM-L652-R | SEQ ID NO: 118 | S, T, V, Y | |
| T653 | 083SM-T653-F | SEQ ID NO: 119 | C, D, E, F, G, H, I, K, L, P, R, S, V, W | C, D, E, F, G, H, I, K, L, P, R, S, |
| | 083SM-T653-R | SEQ ID NO: 120 | | V, W |
| T654 | 083SM-T654-F | SEQ ID NO: 121 | A, C, F, H, I, K, L, M, N, P, Q, R, S, V, | A, C, F, I, K, L, M, P, R, S, V, W, |
| | 083SM-T654-R | SEQ ID NO: 122 | W, Y | Y |
| W655 | 083SM-W655-F | SEQ ID NO: 123 | A, C, E, F, G, L, N, Q, R, S, T, V, Y | F, Y |
| | 083SM-W655-R | SEQ ID NO: 124 | | |

TABLE 18

| Position | Oligo name | Primer Sequence | Identified substitutions | Active substitutions |
|---|---|---|---|---|
| R771 | 083SM-R771-F | SEQ ID NO: 125 | A, C, D, E, F, G, H, I, K, L, N, P, S, T, | A, D, E, F, G, H, I, K, L, N, S, T, |
| | 083SM-R771-R | SEQ ID NO: 126 | V, W, Y | V, W, Y |
| R772 | 083SM-R772-F | SEQ ID NO: 127 | A, C, D, E, F, G, H, I, K, L, M, P, Q, S, | A, C, D, E, F, G, H, I, K, L, M, P, |
| | 083SM-R772-R | SEQ ID NO: 128 | T, V, W, Y | Q, S, T, V, W, Y |
| D773 | 083SM-D773-F | SEQ ID NO: 129 | A, C, E, F, G, H, I, K, L, M, N, P, Q, R, | A, E, F, G, H, I, K, L, M, N, Q, R, |
| | 083SM-D773-R | SEQ ID NO: 130 | S, T, V, W, Y | S, T, V, W, Y |
| Q774 | 083SM-Q774-F | SEQ ID NO: 131 | A, D, G, H, I, K, L, M, N, P, R, S, T, V, | A, D, G, H, I, K, L, M, N, P, R, S, |
| | 083SM-Q774-R | SEQ ID NO: 132 | W, Y | T, V, W, Y |
| V775 | 083SM-V775-F | SEQ ID NO: 133 | A, C, D, E, G, H, I, L, M, N, P, Q, R, S, | A, C, D, E, G, H, I, N, P, Q, R, S, |
| | 083SM-V775-R | SEQ ID NO: 134 | T, Y | T, Y |
| L776 | 083SM-L776-F | SEQ ID NO: 135 | A, C, D, E, F, G, H, I, K, N, P, Q, R, S, | A, C, D, E, F, G, H, I, K, N, P, Q, |
| | 083SM-L776-R | SEQ ID NO: 136 | T, V, W, Y | R, S, T, V, Y |
| P777 | 083SM-P777-F | SEQ ID NO: 137 | A, C, D, E, F, G, H, K, L, M, N, Q, R, S, | A, C, D, E, F, G, H, K, L, M, N, Q, |
| | 083SM-P777-R | SEQ ID NO: 138 | T, V, W, Y | S, T, V, W, Y |
| F778 | 083SM-F778-F | SEQ ID NO: 139 | A, D, G, H, I, K, L, M, N, P, Q, R, S, T, | A, H, I, L, M, N, Q, S, V, W, Y |
| | 083SM-F778-R | SEQ ID NO: 140 | V, W, Y | |
| Q779 | 083SM-Q779-F | SEQ ID NO: 141 | A, C, D, E, F, G, H, I, K, L, N, P, R, S, | A, C, D, E, G, H, K, L, N, P, R, S, |
| | 083SM-Q779-R | SEQ ID NO: 142 | T, V, W | T, V |
| A780 | 083SM-A780-F | SEQ ID NO: 143 | C, D, E, F, G, H, K, L, N, P, Q, R, S, T, | C, N, P, Q, S |
| | 083SM-A780-R | SEQ ID NO: 144 | V, W, Y | |
| A781 | 083SM-A781-F | SEQ ID NO: 145 | C, D, E, F, G, H, I, L, M, N, P, Q, R, S, | C, D, E, F, G, H, I, N, Q, R, S, T, |
| | 083SM-A781-R | SEQ ID NO: 146 | T, V, W, Y | V, W, Y |
| A782 | 083SM-A782-F | SEQ ID NO: 147 | C, D, E, F, G, H, I, K, L, M, N, P, Q, R, | C, D, E, F, G, H, I, K, M, P, Q, R, |
| | 083SM-A782-R | SEQ ID NO: 148 | S, T, V, W, Y | S, T, V, W, Y |
| P783 | 083SM-P783-F | SEQ ID NO: 149 | A, C, D, E, F, G, H, I, L, M, N, Q, R, S, | A, C, D, E, G, H, N, Q, R, S, T, V |
| | 083SM-P783-R | SEQ ID NO: 150 | T, V, Y | |
| L784 | 083SM-L784-F | SEQ ID NO: 151 | A, C, D, E, F, G, H, I, K, M, N, P, Q, R, | A, E, F, H, I, K, M, N, P, Q, S, T, |
| | 083SM-L784-R | SEQ ID NO: 152 | S, T, V, W, Y | V, W |
| N785 | 083SM-N785-F | SEQ ID NO: 153 | A, C, E, F, G, H, I, K, L, M, P, Q, R, S, | A, C, E, F, G, H, I, K, L, M, Q, R, |
| | 083SM-N785-R | SEQ ID NO: 154 | T, V, W, Y | S, T, V, W, Y |
| Y786 | 083SM-Y786-F | SEQ ID NO: 155 | C, D, E, F, G, H, I, K, L, M, N, P, Q, R, | F, I, L, W |
| | 083SM-Y786-R | SEQ ID NO: 156 | S, T, V, W | |

### Example 12—PtIP-83Aa Variants with Multiple Amino Acid Substitutions in Motif a or Motif C

[0507] PtIP-83Aa variants with multiple amino acid substitutions within a motif were constructed for Motif A and Motif C using either the QuikChange® Lightning Site-Directed Mutagenesis Kit (Agilent) (as described in Example 11), or by multi-PCR fragment overlap assembly (Gibson Assembly Cloning Kit, New England Biolabs Inc.) into a plant transient vector containing the viral DMMV promoter. Primers used in constructing combinations of mutations within an individual motif are summarized in Table 19. The resulting combinatory libraries were transformed into Agrobacterium for plant transient expression and subsequent SBL activity assays as described in Example 4. Active variants, defined as having an average activity score of <=60% of leaf disk eaten, were sent for sequence identification.

TABLE 19

| Library | Primer | Sequence |
|---|---|---|
| Motif A | 83M1-CombiF1 | CTCGAGGGAGCCGAGAAAGTGADGCRSYTCTATRTCTTKDSCGACRTCVTCGWGVTC |
| Combi −1 | | CCAGTCGTGGAATGGCGGTGG SEQ ID NO: 157 |
| | 83M1-CombiF2 | CTCGAGGGAGCCGAGAAAGTGADGCRSYTCVTCRTCTTKDSCGACRTCVTCGWGVTC |
| | | CCAGTCGTGGAATGGCGGTGG SEQ ID NO: 158 |
| | 83M1-CombiRC1 | CCACCGCCATTCCACGACTGGGABCWCGABGAYGTCGSHMAAGAYATAGARSYGCHT |
| | | CACTTTCTCGGCTCCCTCGAG SEQ ID NO: 159 |
| | 83M1-CombiRC2 | CCACCGCCATTCCACGACTGGGABCWCGABGAYGTCGSHMAAGAYGABGARSYGCHT |
| | | CACTTTCTCGGCTCCCTCGAG SEQ ID NO: 160 |
| Motif A | 83M1Cmb2-R | CGGCCACCGCCATTCCACGACTGGTAGCWCGABAAYGTCGSHAAAAAYATACAASYG |
| Combi −2 | | CHTCACTTTCTCGGCTCCCTCGAGCTG SEQ ID NO: 161 |
| | GZ550-83Aa-F | AATCTCTCATCTAAGAGGCTGGATCCTAGGATGGCTCTCGTGGATTACGGC SEQ ID |
| | | NO: 162 |
| | GZ550-83Aa-R | TGGCCAATCCAGAAGATGGACAAGTCTAGACTACTCTTCGTCGTGCCGCCAG SEQ |
| | | ID NO: 163 |
| | 83M1Cmb2-3p-F | CTACCAGTCGTGGAATGGCGGTGGCCG SEQ ID NO: 164 |
| Motif C | PtIP-83-MotifC- | GTCTCGGAGGTTCCGGTGTGGABSGBCMRGTGCAASWSCGTGGCTGCACTGGGTCGG |
| Combi | Combi-F1 | GAGATG SEQ ID NO: 165 |
| | PtIP-83-MotifC- | GTCTCGGAGGTTCCGGTGTGGCWSGBCMRGTGCAASWSCGTGGCTGCACTGGGTCGG |
| | Combi-F2 | GAGATG SEQ ID NO: 166 |
| | PtIP-83-MotifC- | GTCTCGGAGGTTCCGGTGTGGABSGBCMRGTGCAASMATGTGGCTGCACTGGGTCGG |
| | Combi-F3 | GAGATG SEQ ID NO: 167 |
| | PtIP-83-MotifC- | GTCTCGGAGGTTCCGGTGTGGCWSGBCMRGTGCAASMATGTGGCTGCACTGGGTCGG |
| | Combi-F4 | GAGATG SEQ ID NO: 168 |
| | GZ550-83Aa-F | AATCTCTCATCTAAGAGGCTGGATCCTAGGATGGCTCTCGTGGATTACGGC SEQ ID |
| | | NO: 162 |
| | GZ550-83Aa-R | TGGCCAATCCAGAAGATGGACAAGTCTAGACTACTCTTCGTCGTGCCGCCAG SEQ |
| | | ID NO: 163 |
| | PtIP-83-MotifC- | CACCGGAACCTCCGAGACTTCCGTT SEQ ID NO: 171 |
| | Gibson-R | |

[0508] Two libraries with differing mutation rates were screened for Motif A. Motif A Combi-1 contains potential mutations at positions K54, R55, L56, Y57, V58, F59, A60, V62, V63, E64, and L65 in PtIP-83Aa (SEQ ID NO: 1): Motif A Combi-2 contains potential mutations at positions K54, R55, V58, A60, V62, V63, and E64 in PtIP-83Aa (SEQ ID NO: 1): From Motif A Combi −1, sequences were recovered for 5 active unique variants (96 total screened). From Motif A Combi −2, sequences were recovered for 59 active unique variants (192 total screened). Table 20 summarizes the amino acid substitutions of the resulting active PtIP-83Aa Motif A variants as compared to PtIP-83Aa.

TABLE 20

| | | Motif A amino | Additional | Total # |
|---|---|---|---|---|
| Variants | DNA sequence | acid sequence | mutations | Mut. |
| PtIP-83Aa | SEQ ID NO: 2 | VKRLYVFADVVELP (a.a. 53- | | 0 |
| SEQ ID NO: 1 | | 66 of SEQ ID NO: 1) | | |
| PtIP-83cmbM1-1 | SEQ ID NO: 172 | VKHLYIFCDVIELP (a.a. 53- | | 4 |
| SEQ ID NO: 236 | | 66 of SEQ ID NO: 236) | | |
| PtIP-83cmbM1-2 | SEQ ID NO: 173 | VKHLYIFCDVVELP (a.a. 53- | | 3 |
| SEQ ID NO: 237 | | 66 of SEQ ID NO: 237) | | |
| PtIP-83cmbM1-3 | SEQ ID NO: 174 | VKHLYIFSDIIELP (a.a. 53- | | 5 |
| SEQ ID NO: 238 | | 66 of SEQ ID NO: 238) | | |
| PtIP-83cmbM1-4 | SEQ ID NO: 175 | VKHLYIFTDVLELP (a.a. 53- | | 4 |
| SEQ ID NO: 239 | | 66 of SEQ ID NO: 239) | | |
| PtIP-83cmbM1-5 | SEQ ID NO: 176 | VKHLYVFADIIVLP (a.a. 53- | | 4 |
| SEQ ID NO: 240 | | 66 of SEQ ID NO: 240) | | |
| PtIP-83cmbM1-6 | SEQ ID NO: 177 | VKHLYVFADVIELP (a.a. 53- | | 2 |
| SEQ ID NO: 241 | | 66 of SEQ ID NO: 241) | | |
| PtIP-83cmbM1-7 | SEQ ID NO: 178 | VKHLYVFGDVIELP (a.a. 53- | | 3 |
| SEQ ID NO: 242 | | 66 of SEQ ID NO: 242) | | |
| PtIP-83cmbM1-8 | SEQ ID NO: 179 | VKHLYVFSDVIELP (a.a. 53- | | 3 |
| SEQ ID NO: 243 | | 66 of SEQ ID NO: 243) | | |
| PtIP-83cmbM1-9 | SEQ ID NO: 180 | VKHLYVFSDVLVLP (a.a. 53- | | 4 |
| SEQ ID NO: 244 | | 66 of SEQ ID NO: 244) | | |
| PtIP-83cmbM1-10 | SEQ ID NO: 181 | VKQLIIFSDIIELP (a.a. 53- | | 6 |
| SEQ ID NO: 245 | | 66 of SEQ ID NO: 245) | | |
| PtIP-83cmbM1-11 | SEQ ID NO: 182 | VKQLYIFCDIIELP (a.a. 53- | | 5 |
| SEQ ID NO: 246 | | 66 of SEQ ID NO: 246) | | |
| PtIP-83cmbM1-12 | SEQ ID NO: 183 | VKQLYIFCDVLELP (a.a. 53- | | 4 |
| SEQ ID NO: 247 | | 66 of SEQ ID NO: 247) | | |
| PtIP-83cmbM1-13 | SEQ ID NO: 184 | VKQLYIFGDVIELP (a.a. 53- | | 4 |
| SEQ ID NO: 248 | | 66 of SEQ ID NO: 248) | | |
| PtIP-83cmbM1-14 | SEQ ID NO: 185 | VKQLYIFSDIIELP (a.a. 53- | V24I | 6 |
| SEQ ID NO: 249 | | 66 of SEQ ID NO: 249) | | |
| PtIP-83cmbM1-15 | SEQ ID NO: 186 | VKQLYVFCDILELP (a.a. 53- | | 4 |
| SEQ ID NO: 250 | | 66 of SEQ ID NO: 250) | | |
| PtIP-83cmbM1-16 | SEQ ID NO: 187 | VKQLYVFSDILELP (a.a. 53- | | 4 |
| SEQ ID NO: 251 | | 66 of SEQ ID NO: 251) | | |
| PtIP-83cmbM1-17 | SEQ ID NO: 188 | VKQLYVFSDVLVLP (a.a. 53- | | 4 |
| SEQ ID NO: 252 | | 66 of SEQ ID NO: 252) | | |
| PtIP-83cmbM1-18 | SEQ ID NO: 189 | VKRFYIFADIVELP (a.a. 53- | | 3 |
| SEQ ID NO: 253 | | 66 of SEQ ID NO: 253-) | | |
| PtIP-83cmbM1-19 | SEQ ID NO: 190 | VKRFYIFSDIIELP (a.a. 53- | | 5 |
| SEQ ID NO: 254 | | 66 of SEQ ID NO: 254) | | |
| PtIP-83cmbM1-20 | SEQ ID NO: 191 | VKRFYVFSDIVELP (a.a. 53- | | 3 |
| SEQ ID NO: 255 | | 66 of SEQ ID NO: 255) | | |
| PtIP-83cmbM1-21 | SEQ ID NO: 192 | VKRLVILGDIIVVP (a.a. 53- | | 8 |
| SEQ ID NO: 256 | | 66 of SEQ ID NO: 256) | | |
| PtIP-83cmbM1-22 | SEQ ID NO: 193 | VKRLYIFADIIELP (a.a. 53- | | 3 |
| SEQ ID NO: 257 | | 66 of SEQ ID NO: 257) | | |
| PtIP-83cmbM1-23 | SEQ ID NO: 194 | VKRLYIFCDIIVLP (a.a. 53- | | 5 |
| SEQ ID NO: 258 | | 66 of SEQ ID NO: 258) | | |
| PtIP-83cmbM1-24 | SEQ ID NO: 195 | VKRLYIFCDIVELP (a.a. 53- | | 3 |
| SEQ ID NO: 259 | | 66 of SEQ ID NO: 259) | | |
| PtIP-83cmbM1-25 | SEQ ID NO: 196 | VKRLYIFGDIIELP (a.a. 53- | P74A | 5 |
| SEQ ID NO: 260 | | 66 of SEQ ID NO: 260) | | |
| PtIP-83cmbM1-26 | SEQ ID NO: 197 | VKRLYIFGDVIELP (a.a. 53- | | 3 |
| SEQ ID NO: 261 | | 66 of SEQ ID NO: 261) | | |
| PtIP-83cmbM1-27 | SEQ ID NO: 198 | VKRLYIFSDIIVLP (a.a. 53- | | 5 |
| SEQ ID NO: 262 | | 66 of SEQ ID NO: 262) | | |
| PtIP-83cmbM1-28 | SEQ ID NO: 199 | VKRLYIFSDILELP (a.a. 53- | | 4 |
| SEQ ID NO: 263 | | 66 of SEQ ID NO: 263) | | |
| PtIP-83cmbM1-29 | SEQ ID NO: 200 | VKRLYIFSDVIVLP (a.a. 53- | | 4 |
| SEQ ID NO: 264 | | 66 of SEQ ID NO: 264) | | |
| PtIP-83cmbM1-30 | SEQ ID NO: 201 | VKRLYIFTDVIELP (a.a. 53- | | 3 |
| SEQ ID NO: 265 | | 66 of SEQ ID NO: 265) | | |
| PtIP-83cmbM1-31 | SEQ ID NO: 202 | VKRLYVFCDIIELP (a.a. 53- | | 3 |
| SEQ ID NO: 266 | | 66 of SEQ ID NO: 266) | | |
| PtIP-83cmbM1-32 | SEQ ID NO: 203 | VKRLYVFCDIIVLP (a.a. 53- | | 4 |
| SEQ ID NO: 267 | | 66 of SEQ ID NO: 267) | | |
| PtIP-83cmbM1-33 | SEQ ID NO: 204 | VKRLYVFGDIVELP (a.a. 53- | | 2 |
| SEQ ID NO: 268 | | 66 of SEQ ID NO: 268) | | |
| PtIP-83cmbM1-34 | SEQ ID NO: 205 | VKRLYVFGDVVELP (a.a. 53- | | 1 |
| SEQ ID NO: 269 | | 66 of SEQ ID NO: 269) | | |
| PtIP-83cmbM1-35 | SEQ ID NO: 206 | VKRLYVFSDIIELP (a.a. 53- | | 3 |
| SEQ ID NO: 270 | | 66 of SEQ ID NO: 270) | | |
| PtIP-83cmbM1-36 | SEQ ID NO: 207 | VKRLYVFSDIVELP (a.a. 53- | | 2 |
| SEQ ID NO: 271 | | 66 of SEQ ID NO: 271) | | |
| PtIP-83cmbM1-37 | SEQ ID NO: 208 | VKRLYVFSDVIELP (a.a. 53- | | 2 |
| SEQ ID NO: 272 | | 66 of SEQ ID NO: 272) | | |
| PtIP-83cmbM1-38 | SEQ ID NO: 209 | VKRLYVFTDVIVLP (a.a. 53- | | 3 |
| SEQ ID NO: 273 | | 66 of SEQ ID NO: 273) | | |
| PtIP-83cmbM1-39 | SEQ ID NO: 210 | VKRLYVFTDVVVLP (a.a. 53- | | 2 |
| SEQ ID NO: 274 | | 66 of SEQ ID NO: 274) | | |
| PtIP-83cmbM1-40 | SEQ ID NO: 211 | VMHLYIFADVIELP (a.a. 53- | | 4 |
| SEQ ID NO: 275 | | 66 of SEQ ID NO: 275) | | |
| PtIP-83cmbM1-41 | SEQ ID NO: 212 | VMQLYIFCDILELP (a.a. 53- | P74T | 7 |
| SEQ ID NO: 276 | | 66 of SEQ ID NO: 276) | | |
| PtIP-83cmbM1-42 | SEQ ID NO: 213 | VMRLYIFADVVVLP (a.a. 53- | | 3 |
| SEQ ID NO: 277 | | 66 of SEQ ID NO: 277) | | |
| PtIP-83cmbM1-43 | SEQ ID NO: 214 | VMRLYIFCDVIELP (a.a. 53- | | 4 |
| SEQ ID NO: 278 | | 66 of SEQ ID NO: 278) | | |
| PtIP-83cmbM1-44 | SEQ ID NO: 215 | VMRLYVECDIIELP (a.a. 53- | | 4 |
| SEQ ID NO: 279 | | 66 of SEQ ID NO: 279) | | |
| PtIP-83cmbM1-45 | SEQ ID NO: 216 | VMRLYVFCDILVLP (a.a. 53- | | 5 |
| SEQ ID NO: 280 | | 66 of SEQ ID NO: 280) | | |
| PtIP-83cmbM1-46 | SEQ ID NO: 217 | VMRLYVFSDIIVLP (a.a. 53- | | 5 |
| SEQ ID NO: 281 | | 66 of SEQ ID NO: 281) | | |
| PtIP-83cmbM1-47 | SEQ ID NO: 218 | VRHLYIFADIIELP (a.a. 53- | | 5 |
| SEQ ID NO: 282 | | 66 of SEQ ID NO: 282) | | |
| PtIP-83cmbM1-48 | SEQ ID NO: 219 | VRHLYIFADVVELP (a.a. 53- | | 3 |
| SEQ ID NO: 283 | | 66 of SEQ ID NO: 283) | | |
| PtIP-83cmbM1-49 | SEQ ID NO: 220 | VRHLYIFCDVIELP (a.a. 53- | | 5 |
| SEQ ID NO: 284 | | 66 of SEQ ID NO: 284) | | |
| PtIP-83cmbM1-50 | SEQ ID NO: 221 | VRHLYIFSDVIELP (a.a. 53- | | 5 |
| SEQ ID NO: 285 | | 66 of SEQ ID NO: 285) | | |
| PtIP-83cmbM1-51 | SEQ ID NO: 222 | VRHLYIFSDVVELP (a.a. 53- | | 4 |
| SEQ ID NO: 286 | | 66 of SEQ ID NO: 286) | | |
| PtIP-83cmbM1-52 | SEQ ID NO: 223 | VRHLYVFTDVLELP (a.a. 53- | | 4 |
| SEQ ID NO: 287 | | 66 of SEQ ID NO: 287) | | |
| PtIP-83cmbM1-53 | SEQ ID NO: 224 | VRQLYIFCDVIVLP (a.a. 53- | | 6 |
| SEQ ID NO: 288 | | 66 of SEQ ID NO: 288) | | |
| PtIP-83cmbM1-54 | SEQ ID NO: 225 | VRQLYIFSDVVVLP (a.a. 53- | | 5 |
| SEQ ID NO: 289 | | 66 of SEQ ID NO: 289) | | |
| PtIP-83cmbM1-55 | SEQ ID NO: 226 | VRQLYVFCDVLVLP (a.a. 53- | | 5 |
| SEQ ID NO: 290 | | 66 of SEQ ID NO: 290) | | |
| PtIP-83cmbM1-56 | SEQ ID NO: 227 | VRRLYIFADILELP (a.a. 53- | | 4 |
| SEQ ID NO: 291 | | 66 of SEQ ID NO: 291) | | |
| PtIP-83cmbM1-57 | SEQ ID NO: 228 | VRRLYIFADIVELP (a.a. 53- | P74A | 4 |
| SEQ ID NO: 292 | | 66 of SEQ ID NO: 292) | | |
| PtIP-83cmbM1-58 | SEQ ID NO: 229 | VRRLYIFGDIVELP (a.a. 53- | | 4 |
| SEQ ID NO: 293 | | 66 of SEQ ID NO: 293) | | |
| PtIP-83cmbM1-59 | SEQ ID NO: 230 | VRRLYIFTDIIELP (a.a. 53- | | 5 |
| SEQ ID NO: 294 | | 66 of SEQ ID NO: 294) | | |
| PtIP-83cmbM1-60 | SEQ ID NO: 231 | VRRLYVFADIIDLP (a.a. 53- | | 4 |
| SEQ ID NO: 295 | | 66 of SEQ ID NO: 295) | | |
| PtIP-83cmbM1-61 | SEQ ID NO: 232 | VRRLYVFADIVVLP (a.a. 53- | | 3 |
| SEQ ID NO: 296 | | 66 of SEQ ID NO: 296) | | |
| PtIP-83cmbM1-62 | SEQ ID NO: 233 | VRRLYVFCDVVVLP (a.a. 53- | | 3 |
| SEQ ID NO: 297 | | 66 of SEQ ID NO: 297) | | |
| PtIP-83cmbM1-63 | SEQ ID NO: 234 | VRRLYVFTDIIELP (a.a. 53- | | 4 |
| SEQ ID NO: 298 | | 66 of SEQ ID NO: 298) | | |
| PtIP-83cmbM1-64 | SEQ ID NO: 235 | VRRLYVFTDVLVLP (a.a. 53- | | 4 |
| SEQ ID NO: 299 | | 66 of SEQ ID NO: 299) | | |

[0509] A single combination library of Motif C containing potential mutations at positions R557, A558, K559, K561, and N562 of PtIP-83Aa (SEQ ID NO: 1) was screened. From a total of 233 variants screened from Motif C Combi, 34 active unique sequence variants were identified. Table 21 summarizes the amino acid substitutions of the resulting active PtIP-83Aa Motif C variants as compared to PtIP-83Aa.

TABLE 21

| | | | Additional | Total |
|---|---|---|---|---|
| Variants | DNA sequence | AA sequence | mutations | Mutations |
| PtIP-83Aa | SEQ ID NO: 2 | WRAKCKNVA (a.a. 556- | | 0 |
| SEQ ID NO: 1 | | 564 of SEQ ID NO: 1) | | |
| PtIP-83cmbM3-1 | SEQ ID NO: 300 | WHARCKSVA (a.a. 556- | | 3 |
| SEQ ID NO: 334 | | 564 of SEQ ID NO: 334) | | |
| PtIP-83cmbM3-2 | SEQ ID NO: 301 | WHGKCKNVA (a.a. 556- | | 2 |
| SEQ ID NO: 335 | | 564 of SEQ ID NO: 335) | | |
| PtIP-83cmbM3-3 | SEQ ID NO: 302 | WIAKCKCVA (a.a. 556- | | 2 |
| SEQ ID NO: 336 | | 564 of SEQ ID NO: 336) | | |
| PtIP-83cmbM3-4 | SEQ ID NO: 303 | WIAKCKSVA (a.a. 556- | | 2 |
| SEQ ID NO: 337 | | 564 of SEQ ID NO: 337) | | |
| PtIP-83cmbM3-5 | SEQ ID NO: 304 | WIGKCKNVA (a.a. 556- | | 2 |
| SEQ ID NO: 338 | | 564 of SEQ ID NO: 338) | | |
| PtIP-83cmbM3-6 | SEQ ID NO: 305 | WIGKCKSVA (a.a. 556- | | 3 |
| SEQ ID NO: 339 | | 564 of SEQ ID NO: 339) | | |
| PtIP-83cmbM3-7 | SEQ ID NO: 306 | WIGKCNNVA (a.a. 556- | | 3 |
| SEQ ID NO: 340 | | 564 of SEQ ID NO: 340) | | |
| PtIP-83cmbM3-8 | SEQ ID NO: 307 | WIVKCKSVA (a.a. 556- | | 3 |
| SEQ ID NO: 341 | | 564 of SEQ ID NO: 341) | | |
| PtIP-83cmbM3-9 | SEQ ID NO: 308 | WLARCKNVA (a.a. 556- | | 2 |
| SEQ ID NO: 342 | | 564 of SEQ ID NO: 342) | | |
| PtIP-83cmbM3-10 | SEQ ID NO: 309 | WLARCKSVA (a.a. 556- | | 3 |
| SEQ ID NO: 343 | | 564 of SEQ ID NO: 343) | | |
| PtIP-83cmbM3-11 | SEQ ID NO: 310 | WLGRCKNVA (a.a. 556 | | 3 |
| SEQ ID NO: 344 | | 564 of SEQ ID NO: 344) | | |
| PtIP-83cmbM3-12 | SEQ ID NO: 311 | WLGRCKSVA (a.a. 556- | | 4 |
| SEQ ID NO: 345 | | 564 of SEQ ID NO: 345) | | |
| PtIP-83cmbM3-13 | SEQ ID NO: 312 | WLVKCKCVA (a.a. 556- | | 3 |
| SEQ ID NO: 346 | | 564 of SEQ ID NO: 346) | | |
| PtIP-83cmbM3-14 | SEQ ID NO: 313 | WMAKCKNVA (a.a. 556- | A502S | 2 |
| SEQ ID NO: 347 | | 564 of SEQ ID NO: 347) | | |
| PtIP-83cmbM3-15 | SEQ ID NO: 314 | WMGRCKSVA (a.a. 556- | | 4 |
| SEQ ID NO: 348 | | 564 of SEQ ID NO: 348) | | |
| PtIP-83cmbM3-16 | SEQ ID NO: 315 | WMVKCKNVA (a.a. 556- | | 2 |
| SEQ ID NO: 349 | | 564 of SEQ ID NO: 349) | | |
| PtIP-83cmbM3-17 | SEQ ID NO: 316 | WMVKCKSVA (a.a. 556- | | 3 |
| SEQ ID NO: 350 | | 564 of SEQ ID NO: 350) | | |
| PtIP-83cmbM3-18 | SEQ ID NO: 317 | WMVRCKNVA (a.a. 556- | | 3 |
| SEQ ID NO: 351 | | 564 of SEQ ID NO: 351) | | |
| PtIP-83cmbM3-19 | SEQ ID NO: 318 | WQARCKHVA (a.a. 556- | | 3 |
| SEQ ID NO: 352 | | 564 of SEQ ID NO: 352) | | |
| PtIP-83cmbM3-20 | SEQ ID NO: 319 | WQARCKNVA (a.a. 556- | K505N | 3 |
| SEQ ID NO: 353 | | 564 of SEQ ID NO: 353) | | |
| PtIP-83cmbM3-21 | SEQ ID NO: 320 | WQGRCKNVA (a.a. 556- | | 3 |
| SEQ ID NO: 354 | | 564 of SEQ ID NO: 354) | | |
| PtIP-83cmbM3-22 | SEQ ID NO: 321 | WQVRCKSVA (a.a. 556- | | 4 |
| SEQ ID NO: 355 | | 564 of SEQ ID NO: 355) | | |
| PtIP-83cmbM3-23 | SEQ ID NO: 322 | WRARCKNVA (a.a. 556- | T573A | 2 |
| SEQ ID NO: 356 | | 564 of SEQ ID NO: 356) | | |
| PtIP-83cmbM3-24 | SEQ ID NO: 323 | WRGKCKSVA (a.a. 556- | | 2 |
| SEQ ID NO: 357 | | 564 of SEQ ID NO: 357) | | |
| PtIP-83cmbM3-25 | SEQ ID NO: 324 | WRGRCKTVA (a.a. 556- | | 3 |
| SEQ ID NO: 358 | | 564 of SEQ ID NO: 358) | | |
| PtIP-83cmbM3-26 | SEQ ID NO: 325 | WSARCKSVA (a.a. 556- | | 3 |
| SEQ ID NO: 359 | | 564 of SEQ ID NO: 359) | | |
| PtIP-83cmbM3-27 | SEQ ID NO: 326 | WSVKCKHVA (a.a. 556- | | 3 |
| SEQ ID NO: 360 | | 564 of SEQ ID NO: 360) | | |
| PtIP-83cmbM3-28 | SEQ ID NO: 327 | WTGRCKTVA (a.a. 556- | | 4 |
| SEQ ID NO: 361 | | 564 of SEQ ID NO: 361) | | |
| PtIP-83cmbM3-29 | SEQ ID NO: 328 | WTGRCNHVA (a.a. 556- | R568Q | 6 |
| SEQ ID NO: 362 | | 564 of SEQ ID NO: 362) | | |
| PtIP-83cmbM3-30 | SEQ ID NO: 329 | WTVKCKNVA (a.a. 556- | | 2 |
| SEQ ID NO: 363 | | 564 of SEQ ID NO: 363) | | |
| PtIP-83cmbM3-31 | SEQ ID NO: 330 | WTVKCKSVA (a.a. 556- | | 3 |
| SEQ ID NO: 364 | | 564 of SEQ ID NO: 364) | | |
| PtIP-83cmbM3-32 | SEQ ID NO: 331 | WTVRCKNVA (a.a. 556- | | 3 |
| SEQ ID NO: 365 | | 564 of SEQ ID NO: 365) | | |
| PtIP-83cmbM3-33 | SEQ ID NO: 332 | WRARCKHVA (a.a. 556- | | 2 |
| SEQ ID NO: 366 | | 564 of SEQ ID NO: 366) | | |
| PtIP-83cmbM3-34 | SEQ ID NO: 333 | WIGRCKSVA (a.a. 556- | | 4 |
| SEQ ID NO: 367 | | 564 of SEQ ID NO: 367) | | |

### Example 13—PtIP-83Aa Variants with Multiple Amino Acid Substitutions in Motif a and Motif C

[0510] Additional sequence diversity was created by combining active Motif A combinations with active Motif C combinations. Twenty four unique active Motif A combination variants and 11 unique active Motif C combination variants were selected for construction of a Motif A×Motif C Library (Table 22).

TABLE 22
Sequence variants used for construction
of Motif A × Motif C Combination Library

| Motif A | | Motif C |
|---|---|---|
| PtIP-83cmbM1-1 | PtIP-83cmbM1-32 | PtIP-83cmbM3-2 |
| SEQ ID NO: 236 | SEQ ID NO: 267 | SEQ ID NO: 335 |
| PtIP-83cmbM1-2 | PtIP-83cmbM1-35 | PtIP-83cmbM3-5 |
| SEQ ID NO: 237 | SEQ ID NO: 270 | SEQ ID NO: 338 |
| PtIP-83cmbM1-4 | PtIP-83cmbM1-36 | PtIP-83cmbM3-9 |
| SEQ ID NO: 239 | SEQ ID NO: 271 | SEQ ID NO: 342 |
| PtIP-83cmbM1-6 | PtIP-83cmbM1-37 | PtIP-83cmbM3-11 |
| SEQ ID NO: 241 | SEQ ID NO: 272 | SEQ ID NO: 344 |
| PtIP-83cmbM1-12 | PtIP-83cmbM1-44 | PtIP-83cmbM3-16 |
| SEQ ID NO: 247 | SEQ ID NO: 279 | SEQ ID NO: 349 |
| PtIP-83cmbM1-15 | PtIP-83cmbM1-49 | PtIP-83cmbM3-19 |
| SEQ ID NO: 250 | SEQ ID NO: 284 | SEQ ID NO: 352 |
| PtIP-83cmbM1-16 | PtIP-83cmbM1-51 | PtIP-83cmbM3-20 |
| SEQ ID NO: 251 | SEQ ID NO: 286 | SEQ ID NO: 353 |
| PtIP-83cmbM1-18 | PtIP-83cmbM1-55 | PtIP-83cmbM3-23 |
| SEQ ID NO: 253 | SEQ ID NO: 290 | SEQ ID NO: 356 |
| PtIP-83cmbM1-21 | PtIP-83cmbM1-56 | PtIP-83cmbM3-24 |
| SEQ ID NO: 256 | SEQ ID NO: 291 | SEQ ID NO: 357 |
| PtIP-83cmbM1-22 | PtIP-83cmbM1-60 | PtIP-83cmbM3-25 |
| SEQ ID NO: 257 | SEQ ID NO: 295 | SEQ ID NO: 358 |
| PtIP-83cmbM1-30 | PtIP-83cmbM1-62 | PtIP-83cmbM3-30 |
| SEQ ID NO: 265 | SEQ ID NO: 297 | SEQ ID NO: 363 |
| PtIP-83cmbM1-31 | PtIP-83cmbM1-64 | |
| SEQ ID NO: 266 | SEQ ID NO: 299 | |

[0511] Plasmid DNA was isolated from these variants and pooled by motif. Motif A combinations were PCR amplified from the Motif A pool using the following primers: AATCTCTCATCTAAGAGGCTGGATCCTAGGATGGCTCTCGTGGATTACGGC (SEQ ID NO: 630) and GCAGCCACAACCTCCATCACAGC (SEQ ID NO: 631). Motif C combinations were PCR amplified from the Motif C pool using the following primers: TGGCCAATCCAGAAGATGGACAAGTCTAGACTACTCTTCGTCGTGCCGCCAG (SEQ ID NO: 632) and GCTGTGATGGAGGTTGTGGCTGC (SEQ ID NO: 633). The two PCR products were then assembled by multi-PCR fragments overlap (Gibson Assembly Cloning Kit, New England Biolabs Inc) into a plant transient vector containing the viral DMMV promoter. 94 variants from this library were screened by plant transient expression and SBL activity assay as described in Example 4. 30 unique active variants, defined as having an average activity score of <=60% of leaf disk eaten, were identified by sequencing. Table 23 summarizes the amino acid substitutions of the resulting active PtIP-83Aa Motif A×Motif C variants as compared to PtIP-83Aa.

TABLE 23

| | | | Motif C | Add. | Total |
|---|---|---|---|---|---|
| Variant | DNA sequence | Motif A sequence | sequence | Mut. | Mut. |
| PtIP-83Aa | SEQ ID NO: 2 | VKRLYVFADVVELP | WRAKCKNVA | | 0 |
| SEQ ID NO: 1 | | (a.a. 53-66 of | (a.a. 556- | | |
| | | SEQ ID NO: 1) | 564 of SEQ ID | | |
| | | | NO: 1) | | |
| PtIP-83cmbM1xM3-1 | SEQ ID NO: 368 | VKHLYIFTDVLELP | WHGKCKNVA | S533F | 7 |
| SEQ ID NO: 398 | | (a.a. 53-66 of | (a.a. 556- | | |
| | | SEQ ID NO: 398) | 564 of SEQ ID | | |
| | | | NO: 398) | | |
| PtIP-83cmbM1xM3-2 | SEQ ID NO: 369 | VKHLYIFTDVLELP | WLARCKNVA | | 6 |
| SEQ ID NO: 399 | | (a.a. 53-66 of | (a.a. 556- | | |
| | | SEQ ID NO: 399) | 564 of SEQ ID | | |
| | | | NO: 399) | | |
| PtIP-83cmbM1xM3-3 | SEQ ID NO: 370 | VKHLYIFTDVLELP | WQARCKHVA | | 7 |
| SEQ ID NO: 400 | | (a.a. 53-66 of | (a.a. 556- | | |
| | | SEQ ID NO: 400) | 564 of SEQ ID | | |
| | | | NO: 400) | | |
| PtIP-83cmbM1xM3-4 | SEQ ID NO: 371 | VKHLYVFADVIELP | WQARCKHVA | | 5 |
| SEQ ID NO: 401 | | (a.a. 53-66 of | (a.a. 556- | | |
| | | SEQ ID NO: 401) | 564 of SEQ ID | | |
| | | | NO: 401) | | |
| PtIP-83cmbM1xM3-5 | SEQ ID NO: 372 | VKHLYVFADVIELP | WRARCKNVA | | 3 |
| SEQ ID NO: 402 | | (a.a. 53-66 of | (a.a. 556- | | |
| | | SEQ ID NO: 402) | 564 of SEQ ID | | |
| | | | NO: 402) | | |
| PtIP-83cmbM1xM3-6 | SEQ ID NO: 373 | VKQLYIFCDVLELP | WQARCKNVA | | 6 |
| SEQ ID NO: 403 | | (a.a. 53-66 of | (a.a. 556- | | |
| | | SEQ ID NO: 403) | 564 of SEQ ID | | |
| | | | NO: 403) | | |
| PtIP-83cmbM1xM3-7 | SEQ ID NO: 374 | VKRFYIFADIVELP | WIGKCKNVA | | 5 |
| SEQ ID NO: 404 | | (a.a. 53-66 of | (a.a. 556- | | |
| | | SEQ ID NO: 404) | 564 of SEQ ID | | |
| | | | NO: 404) | | |
| PtIP-83cmbM1xM3-8 | SEQ ID NO: 375 | VKRFYIFADIVELP | WTVKCKNVA | | 5 |
| SEQ ID NO: 405 | | (a.a. 53-66 of | (a.a. 556- | | |
| | | SEQ ID NO: 405) | 564 of SEQ ID | | |
| | | | NO: 405) | | |
| PtIP-83cmbM1xM3-9 | SEQ ID NO: 376 | VKRLYIFADIIELP | WMVKCKNVA | | 5 |
| SEQ ID NO: 406 | | (a.a. 53-66 of | (a.a. 556- | | |
| | | SEQ ID NO: 406) | 564 of SEQ ID | | |
| | | | NO: 406) | | |
| PtIP-83cmbM1xM3-10 | SEQ ID NO: 377 | VKRLYIFADIIELP | WQARCKNVA | | 5 |
| SEQ ID NO: 407 | | (a.a. 53-66 of | (a.a. 556- | | |
| | | SEQ ID NO: 407) | 564 of SEQ ID | | |
| | | | NO: 407) | | |
| PtIP-83cmbM1xM3-11 | SEQ ID NO: 378 | VKRLYIFADIIELP | WRGKCKSVA | K52E, | 7 |
| SEQ ID NO: 408 | | (a.a. 53-66 of | (a.a. 556- | K505N | |
| | | SEQ ID NO: 408) | 564 of SEQ ID | | |
| | | | NO: 408) | | |
| PtIP-83cmbM1xM3-12 | SEQ ID NO: 379 | VKRLYIFADIIELP | WRGRCKTVA | | 6 |
| SEQ ID NO: 409 | | (a.a. 53-66 of | (a.a. 556- | | |
| | | SEQ ID NO: 409) | 564 of SEQ ID | | |
| | | | NO: 409) | | |
| PtIP-83cmbM1xM3-13 | SEQ ID NO: 380 | VKRLYIFTDVIELP | WIGKCKNVA | | 5 |
| SEQ ID NO: 410 | | (a.a. 53-66 of | (a.a. 556- | | |
| | | SEQ ID NO: 410) | 564 of SEQ ID | | |
| | | | NO: 410) | | |
| PtIP-83cmbM1xM3-14 | SEQ ID NO: 381 | VKRLYVFCDIIELP | WLARCKNVA | | 5 |
| SEQ ID NO: 411 | | (a.a. 53-66 of | (a.a. 556- | | |
| | | SEQ ID NO: 411) | 564 of SEQ ID | | |
| | | | NO: 411) | | |
| PtIP-83cmbM1xM3-15 | SEQ ID NO: 382 | VKRLYVESDIIELP | WIGKCKNVA | | 5 |
| SEQ ID NO: 412 | | (a.a. 53-66 of | (a.a. 556- | | |
| | | SEQ ID NO: 412) | 564 of SEQ ID | | |
| | | | NO: 412) | | |
| PtIP-83cmbM1xM3-16 | SEQ ID NO: 383 | VKRLYVFSDIIELP | WRGRCKTVA | | 6 |
| SEQ ID NO: 413 | | (a.a. 53-66 of | (a.a. 556- | | |
| | | SEQ ID NO: 413) | 564 of SEQ ID | | |
| | | | NO: 413) | | |
| PtIP-83cmbM1xM3-17 | SEQ ID NO: 384 | VKRLYVFSDVIELP | WRGKCKSVA | | 4 |
| SEQ ID NO: 414 | | (a.a. 53-66 of | (a.a. 556- | | |
| | | SEQ ID NO: 414) | 564 of SEQ ID | | |
| | | | NO: 414) | | |
| PtIP-83cmbM1xM3-18 | SEQ ID NO: 385 | VKRLYVFSDVIELP | WRVKCKNVA | | 3 |
| SEQ ID NO: 415 | | (a.a. 53-66 of | (a.a. 556- | | |
| | | SEQ ID NO: 415) | 564 of SEQ ID | | |
| | | | NO: 415) | | |
| PtIP-83cmbM1xM3-19 | SEQ ID NO: 386 | VMRLYIFADVVELP | WRGKCKSVA | | 4 |
| SEQ ID NO: 416 | | (a.a. 53-66 of | (a.a. 556- | | |
| | | SEQ ID NO: 416) | 564 of SEQ ID | | |
| | | | NO: 416) | | |
| PtIP-83cmbM1xM3-20 | SEQ ID NO: 387 | VRHLYIFCDVIELP | WIGKCKNVA | | 7 |
| SEQ ID NO: 417 | | (a.a. 53-66 of | (a.a. 556- | | |
| | | SEQ ID NO: 417) | 564 of SEQ ID | | |
| | | | NO: 417) | | |
| PtIP-83cmbM1xM3-21 | SEQ ID NO: 388 | VRHLYIFSDVVELP | WMVKCKNVA | | 6 |
| SEQ ID NO: 418 | | (a.a. 53-66 of | (a.a. 556- | | |
| | | SEQ ID NO: 418) | 564 of SEQ ID | | |
| | | | NO: 418) | | |
| PtIP-83cmbM1xM3-22 | SEQ ID NO: 389 | VRHLYIFSDVVELP | WRGKCKSVA | K505N | 7 |
| SEQ ID NO: 419 | | (a.a. 53-66 of | (a.a. 556- | | |
| | | SEQ ID NO: 419) | 564 of SEQ ID | | |
| | | | NO: 419) | | |
| PtIP-83cmbM1xM3-23 | SEQ ID NO: 390 | VRQLYVFCDVLVLP | WHGKCKNVA | | 7 |
| SEQ ID NO: 420 | | (a.a. 53-66 of | (a.a. 556- | | |
| | | SEQ ID NO: 420) | 564 of SEQ ID | | |
| | | | NO: 420) | | |
| PtIP-83cmbM1xM3-24 | SEQ ID NO: 391 | VRQLYVFCDVLVLP | WLGRCKNVA | | 8 |
| SEQ ID NO: 421 | | (a.a. 53-66 of | (a.a. 556- | | |
| | | SEQ ID NO: 421) | 564 of SEQ ID | | |
| | | | NO: 421) | | |
| PtIP-83cmbM1xM3-25 | SEQ ID NO: 392 | VRQLYVFCDVLVLP | WRGKCKSVA | M1I | 8 |
| SEQ ID NO: 422 | | (a.a. 53-66 of | (a.a. 556- | | |
| | | SEQ ID NO: 422) | 564 of SEQ ID | | |
| | | | NO: 422) | | |
| PtIP-83cmbM1xM3-26 | SEQ ID NO: 393 | VRRLYIFADILELP | WMVKCKNVA | | 6 |
| SEQ ID NO: 423 | | (a.a. 53-66 of | (a.a. 556- | | |
| | | SEQ ID NO: 423) | 564 of SEQ ID | | |
| | | | NO: 423) | | |
| PtIP-83cmbM1xM3-27 | SEQ ID NO: 394 | VRRLYVFCDVVVLP | WRARCKNVA | | 4 |
| SEQ ID NO: 424 | | (a.a. 53-66 of | (a.a. 556- | | |
| | | SEQ ID NO: 424) | 564 of SEQ ID | | |
| | | | NO: 424) | | |
| PtIP-83cmbM1xM3-28 | SEQ ID NO: 395 | VRRLYVFTDVLVLP | WIGKCKNVA | | 6 |
| SEQ ID NO: 425 | | (a.a. 53-66 of | (a.a. 556- | | |
| | | SEQ ID NO: 425) | 564 of SEQ ID | | |
| | | | NO: 425) | | |
| PtIP-83cmbM1xM3-29 | SEQ ID NO: 396 | VRRLYVFTDVLVLP | WRARCKNVA | | 5 |
| SEQ ID NO: 426 | | (a.a. 53-66 of | (a.a. 556- | | |
| | | SEQ ID NO: 426) | 564 of SEQ ID | | |
| | | | NO: 426) | | |
| PtIP-83cmbM1xM3-30 | SEQ ID NO: 397 | VRRLYVFTDVLVLP | WTVKCKNVA | | 6 |
| SEQ ID NO: 427 | | (a.a. 53-66 of | (a.a. 556- | | |
| | | SEQ ID NO: 427) | 564 of SEQ ID | | |
| | | | NO: 427) | | |

### Example 14 PtIP-83Aa Variants with Multiple Amino Acid Substitutions

[0512] To create variants of PtIP-83Aa (SEQ ID NO: 1) with multiple amino acid changes, variant libraries were generated by family shuffling (Chia-Chun J. Chang et al, 1999, Nature Biotechnology 17, 793-797) of the polynucleotide (SEQ ID NO: 2) encoding PtIP-83Aa (SEQ ID NO: 1) and the polynucleotide (SEQ ID NO: 2) encoding PtIP-83Cb (SEQ ID NO: 7). Mutation rates of the libraries were controlled by varying the regions of PtIP-83Aa (SEQ ID NO: 1) and PtIP-83Cb (SEQ ID NO: 7) which were included in the shuffling library reaction. Five libraries were generated between the two variants. In the first library (83FS-1), the full length gene sequence from both PtIP-83Aa (SEQ ID NO: 2) and PtIP-83Cb (SEQ ID NO: 8) were included in the shuffling reaction. In the second library (83FS-2), fragments containing nt: 1114-2604 of SEQ ID NO: 2 (encoding PtIP-83Aa (SEQ ID NO: 1)) and nt: 1072-2559 of SEQ ID NO: 8 (encoding PtIP-83Cb (SEQ ID NO: 7)) were shuffled. The shuffled fragments were then combined with nt: 1-1113 of SEQ ID NO: 2 (encoding PtIP-83Aa (SEQ ID NO: 1)) by Gibson Assembly (New England Biolabs). In a third library (83FS-3), the 5′ and 3′ regions of the two variants were shuffled in separate reactions. The 5′ reaction, containing shuffled fragments from nt: 1-1113 of SEQ ID NO: 2 (encoding PtIP-83Aa (SEQ ID NO: 1)) and nt:1-1071 of SEQ ID NO: 8 (encoding PtIP-83Cb (SEQ ID NO: 7)), and the 3′ reaction, containing shuffled fragments from nt: 1114-2604 of SEQ ID NO: 2 (encoding PtIP-83Aa (SEQ ID NO: 1)) and nt: 1072-2559 of SEQ ID NO: 8 (encoding PtIP-83Cb (SEQ ID NO: 7)), were then combined by Gibson Assembly. In a fourth library (83FS-4), fragments from the 5′ region of each variant (nt: 1-1113 of SEQ ID NO: 2 (encoding PtIP-83Aa (SEQ ID NO: 1)) and nt:1-1071 of SEQ ID NO: 8 (encoding PtIP-83Cb (SEQ ID NO: 7)) were shuffled with additional primers spiked into the assembly reaction to promote crossovers between the two variants. The shuffled 5′ region was then combined by Gibson assembly with the 3′ region of either SEQ ID NO: 2 (encoding PtIP-83Aa (SEQ ID NO: 1)) or SEQ ID NO: 8 (encoding PtIP-83Cb (SEQ ID NO: 7)). In the fifth library (83FS-5), single crossover variants were generated manually between SEQ ID NO: 2 (encoding PtIP-83Aa (SEQ ID NO: 1)) and SEQ ID NO: 8 (encoding PtIP-83Cb (SEQ ID NO: 7)) using Gibson assembly.

[0513] All shuffled libraries were cloned into a plant transient expression vector containing the viral dMMV promoter for subsequent transient expression in bush bean and SBL activity assays as described in Example 4. Active variants, defined as having an average activity score of ≤60% of leaf disk eaten, were sent for sequence identification. In library 83F-1, 197 variants were screened and 45 active unique variants were sequence identified. In library 83FS-2, 96 variants were screened and 32 active unique variants were sequence identified. In library 83FS-3, 192 variants were screened and 13 active unique variants were sequence identified. In library 83FS-4, 96 variants were screened and 6 unique active variants were sequence identified. In library 83FS-5, four of the eleven constructed single cross variants were found to be active.

[0514] Sequence identity of active variants to PtIP-83Aa was calculated using the Needleman-Wunsch algorithm, as implemented in the Needle program (EMBOSS tool suite). The percent identity compared to PtIP-83Aa (SEQ ID NO: 1), variant designation, nucleotide sequences, and amino acid sequences of the resulting active PtIP-83Aa polypeptide variants from all libraries are summarized in Table 24. Table 25 summarizes the % identity of the active variants compared to PtIP-83Aa (SEQ ID NO: 1), the number of variants with each % identity, and the variant identification.

TABLE 24

| % Identity to | | | |
|---|---|---|---|
| PtIP-83Aa | | | |
| (SEQ ID NO: 1) | Variant | Polynucleotide | Polypeptide |
| 76 | S04359885 | SEQ ID NO: | SEQ ID NO: |
| | | 428 | 518 |
| 76 | S04359888 | SEQ ID NO: | SEQ ID NO: |
| | | 429 | 519 |
| 73 | S04359896 | SEQ ID NO: | SEQ ID NO: |
| | | 430 | 520 |
| 73 | S04359899 | SEQ ID NO: | SEQ ID NO: |
| | | 431 | 521 |
| 77 | S04359902 | SEQ ID NO: | SEQ ID NO: |
| | | 432 | 522 |
| 76 | S04359909 | SEQ ID NO: | SEQ ID NO: |
| | | 433 | 523 |
| 77 | S04359911 | SEQ ID NO: | SEQ ID NO: |
| | | 434 | 524 |
| 75 | S04359942 | SEQ ID NO: | SEQ ID NO: |
| | | 435 | 525 |
| 74 | S04359944 | SEQ ID NO: | SEQ ID NO: |
| | | 436 | 526 |
| 73 | S04359948 | SEQ ID NO: | SEQ ID NO: |
| | | 437 | 527 |
| 81 | S04359951 | SEQ ID NO: | SEQ ID NO: |
| | | 438 | 528 |
| 80 | S04359988 | SEQ ID NO: | SEQ ID NO: |
| | | 439 | 529 |
| 81 | S04359991 | SEQ ID NO: | SEQ ID NO: |
| | | 440 | 530 |
| 77 | S04360034 | SEQ ID NO: | SEQ ID NO: |
| | | 441 | 531 |
| 76 | S04360059 | SEQ ID NO: | SEQ ID NO: |
| | | 442 | 532 |
| 73 | S04360064 | SEQ ID NO: | SEQ ID NO: |
| | | 443 | 533 |
| 73 | S04360087 | SEQ ID NO: | SEQ ID NO: |
| | | 444 | 534 |
| 73 | S04360095 | SEQ ID NO: | SEQ ID NO: |
| | | 445 | 535 |
| 77 | S04360104 | SEQ ID NO: | SEQ ID NO: |
| | | 446 | 536 |
| 74 | S04360110 | SEQ ID NO: | SEQ ID NO: |
| | | 447 | 537 |
| 77 | S04360119 | SEQ ID NO: | SEQ ID NO: |
| | | 448 | 538 |
| 73 | S04360122 | SEQ ID NO: | SEQ ID NO: |
| | | 449 | 539 |
| 75 | S04360130 | SEQ ID NO: | SEQ ID NO: |
| | | 450 | 540 |
| 78 | S04360132 | SEQ ID NO: | SEQ ID NO: |
| | | 451 | 541 |
| 93 | S04360136 | SEQ ID NO: | SEQ ID NO: |
| | | 452 | 542 |
| 93 | S04360141 | SEQ ID NO: | SEQ ID NO: |
| | | 453 | 543 |
| 77 | S04360143 | SEQ ID NO: | SEQ ID NO: |
| | | 454 | 544 |
| 76 | S04360146 | SEQ ID NO: | SEQ ID NO: |
| | | 455 | 545 |
| 75 | S04360160 | SEQ ID NO: | SEQ ID NO: |
| | | 456 | 546 |
| 79 | S04360435 | SEQ ID NO: | SEQ ID NO: |
| | | 457 | 547 |
| 77 | S04360466 | SEQ ID NO: | SEQ ID NO: |
| | | 458 | 548 |
| 77 | S04360467 | SEQ ID NO: | SEQ ID NO: |
| | | 459 | 549 |
| 73 | S04360469 | SEQ ID NO: | SEQ ID NO: |
| | | 460 | 550 |
| 78 | S04360485 | SEQ ID NO: | SEQ ID NO: |
| | | 461 | 551 |
| 80 | S04360504 | SEQ ID NO: | SEQ ID NO: |
| | | 462 | 552 |
| 76 | S04360545 | SEQ ID NO: | SEQ ID NO: |
| | | 463 | 553 |
| 77 | S04360574 | SEQ ID NO: | SEQ ID NO: |
| | | 464 | 554 |
| 76 | S04360579 | SEQ ID NO: | SEQ ID NO: |
| | | 465 | 555 |
| 74 | S04360592 | SEQ ID NO: | SEQ ID NO: |
| | | 466 | 556 |
| 79 | S04360619 | SEQ ID NO: | SEQ ID NO: |
| | | 467 | 557 |
| 77 | S04360626 | SEQ ID NO: | SEQ ID NO: |
| | | 468 | 558 |
| 77 | S04360660 | SEQ ID NO: | SEQ ID NO: |
| | | 469 | 559 |
| 78 | S04360664 | SEQ ID NO: | SEQ ID NO: |
| | | 470 | 560 |
| 77 | S04360699 | SEQ ID NO: | SEQ ID NO: |
| | | 471 | 561 |
| 76 | S04360787 | SEQ ID NO: | SEQ ID NO: |
| | | 472 | 562 |
| 99 | S04363576 | SEQ ID NO: | SEQ ID NO: |
| | | 473 | 563 |
| 97 | S04363577 | SEQ ID NO: | SEQ ID NO: |
| | | 474 | 564 |
| 95 | S04363578 | SEQ ID NO: | SEQ ID NO: |
| | | 475 | 565 |
| 97 | S04363579 | SEQ ID NO: | SEQ ID NO: |
| | | 476 | 566 |
| 97 | S04363580 | SEQ ID NO: | SEQ ID NO: |
| | | 477 | 567 |
| 95 | S04363584 | SEQ ID NO: | SEQ ID NO: |
| | | 478 | 568 |
| 97 | S04363585 | SEQ ID NO: | SEQ ID NO: |
| | | 479 | 569 |
| 96 | S04363587 | SEQ ID NO: | SEQ ID NO: |
| | | 480 | 570 |
| 96 | S04363588 | SEQ ID NO: | SEQ ID NO: |
| | | 481 | 571 |
| 97 | S04363593 | SEQ ID NO: | SEQ ID NO: |
| | | 482 | 572 |
| 95 | S04363594 | SEQ ID NO: | SEQ ID NO: |
| | | 483 | 573 |
| 96 | S04363600 | SEQ ID NO: | SEQ ID NO: |
| | | 484 | 574 |
| 97 | S04363605 | SEQ ID NO: | SEQ ID NO: |
| | | 485 | 575 |
| 96 | S04363608 | SEQ ID NO: | SEQ ID NO: |
| | | 486 | 576 |
| 96 | S04363609 | SEQ ID NO: | SEQ ID NO: |
| | | 487 | 577 |
| 97 | S04363612 | SEQ ID NO: | SEQ ID NO: |
| | | 488 | 578 |
| 94 | S04363619 | SEQ ID NO: | SEQ ID NO: |
| | | 489 | 579 |
| 97 | S04363623 | SEQ ID NO: | SEQ ID NO: |
| | | 490 | 580 |
| 94 | S04363625 | SEQ ID NO: | SEQ ID NO: |
| | | 491 | 581 |
| 93 | S04363626 | SEQ ID NO: | SEQ ID NO: |
| | | 492 | 582 |
| 97 | S04363629 | SEQ ID NO: | SEQ ID NO: |
| | | 493 | 583 |
| 96 | S04363631 | SEQ ID NO: | SEQ ID NO: |
| | | 494 | 584 |
| 95 | S04363632 | SEQ ID NO: | SEQ ID NO: |
| | | 495 | 585 |
| 94 | S04363638 | SEQ ID NO: | SEQ ID NO: |
| | | 496 | 586 |
| 98 | S04363643 | SEQ ID NO: | SEQ ID NO: |
| | | 497 | 587 |
| 97 | S04363644 | SEQ ID NO: | SEQ ID NO: |
| | | 498 | 588 |
| 97 | S04363646 | SEQ ID NO: | SEQ ID NO: |
| | | 499 | 589 |
| 95 | S04363648 | SEQ ID NO: | SEQ ID NO: |
| | | 500 | 590 |
| 96 | S04363659 | SEQ ID NO: | SEQ ID NO: |
| | | 501 | 591 |
| 94 | S04363660 | SEQ ID NO: | SEQ ID NO: |
| | | 502 | 592 |
| 96 | S04363662 | SEQ ID NO: | SEQ ID NO: |
| | | 503 | 593 |
| 97 | S04363663 | SEQ ID NO: | SEQ ID NO: |
| | | 504 | 594 |
| 64 | S04367796 | SEQ ID NO: | SEQ ID NO: |
| | | 505 | 595 |
| 83 | S04367808 | SEQ ID NO: | SEQ ID NO: |
| | | 506 | 596 |
| 76 | S04367849 | SEQ ID NO: | SEQ ID NO: |
| | | 507 | 597 |
| 78 | S04367850 | SEQ ID NO: | SEQ ID NO: |
| | | 508 | 598 |
| 80 | S04367851 | SEQ ID NO: | SEQ ID NO: |
| | | 509 | 599 |
| 78 | S04367860 | SEQ ID NO: | SEQ ID NO: |
| | | 510 | 600 |
| 77 | S04367872 | SEQ ID NO: | SEQ ID NO: |
| | | 511 | 601 |
| 77 | S04367882 | SEQ ID NO: | SEQ ID NO: |
| | | 512 | 602 |
| 79 | S04367903 | SEQ ID NO: | SEQ ID NO: |
| | | 513 | 603 |
| 78 | S04367917 | SEQ ID NO: | SEQ ID NO: |
| | | 514 | 604 |
| 78 | S04367945 | SEQ ID NO: | SEQ ID NO: |
| | | 515 | 605 |
| 80 | S04367977 | SEQ ID NO: | SEQ ID NO: |
| | | 516 | 606 |
| 78 | S04367983 | SEQ ID NO: | SEQ ID NO: |
| | | 517 | 607 |
| 87 | S04371015 | SEQ ID NO: | SEQ ID NO: |
| | | 718 | 728 |
| 88 | S04371039 | SEQ ID NO: | SEQ ID NO: |
| | | 719 | 729 |
| 84 | S04371062 | SEQ ID NO: | SEQ ID NO: |
| | | 720 | 730 |
| 86 | S04371086 | SEQ ID NO: | SEQ ID NO: |
| | | 721 | 731 |
| 73 | S04382521 | SEQ ID NO: | SEQ ID NO: |
| | | 722 | 732 |
| 84 | S04382532 | SEQ ID NO: | SEQ ID NO: |
| | | 723 | 733 |
| 98 | S04382574 | SEQ ID NO: | SEQ ID NO: |
| | | 724 | 734 |
| 88 | S04382581 | SEQ ID NO: | SEQ ID NO: |
| | | 725 | 735 |
| 89 | S04382591 | SEQ ID NO: | SEQ ID NO: |
| | | 726 | 736 |
| 87 | S04382601 | SEQ ID NO: | SEQ ID NO: |
| | | 727 | 737 |

TABLE 25

| % Identity to | | |
|---|---|---|
| PtIP-83Aa | | |
| (SEQ ID | # | |
| NO: 1) | variants | Variants |
| 99 | 1 | S04363576 |
| 98 | 2 | S04363643, S04382574 |
| 97 | 12 | S04363646, S04363629, S04363612, S04363663, |
| | | S04363585, S04363580, S04363623, S04363579, |
| | | S04363605, S04363644, S04363593, S04363577 |
| 96 | 8 | S04363662, S04363587, S04363631, S04363659, |
| | | S04363608, S04363600, S04363588, S04363609 |
| 95 | 5 | S04363648, S04363632, S04363584, S04363594, |
| | | S04363578 |
| 94 | 4 | S04363660, S04363619, S04363625, S04363638 |
| 93 | 3 | S04363626, S04360136, S04360141 |
| 89 | 1 | S04382591 |
| 88 | 2 | S04371039, S04382581 |
| 87 | 2 | S04371015, S04382601 |
| 86 | 1 | S04371086 |
| 84 | 2 | S04371062, S04382532 |
| 83 | 1 | S04367808 |
| 81 | 2 | S04359951, S04359991 |
| 80 | 4 | S04360504, S04367851, S04367977, S04359988 |
| 79 | 3 | S04367903, S04360435, S04360619 |
| 78 | 8 | S04367983, S04367945, S04367850, S04360485, |
| | | S04367917, S04360664, S04360132, S04367860 |
| 77 | 14 | S04367872, S04360467, S04360119, S04367882, |
| | | S04360104, S04360626, S04359902, S04360143, |
| | | S04359911, S04360034, S04360660, S04360574, |
| | | S04360466, S04360699 |
| 76 | 9 | S04359909, S04360787, S04359888, S04359885, |
| | | S04360579, S04360146, S04360059, S04367849, |
| | | S04360545 |
| 75 | 3 | S04359942, S04360130, S04360160 |
| 74 | 3 | S04360592, S04360110, S04359944 |
| | | S04359896, S04360122, S04360469, S04360087, |
| | | S04359899, S04360064, S04360095, S04359948, |
| 73 | 9 | S04382521 |
| 64 | 1 | S04367796 |

[0515] The above description of various illustrated embodiments of the disclosure is not intended to be exhaustive or to limit the scope to the precise form disclosed. While specific embodiments of and examples are described herein for illustrative purposes, various equivalent modifications are possible within the scope of the disclosure, as those skilled in the relevant art will recognize. The teachings provided herein can be applied to other purposes, other than the examples described above. Numerous modifications and variations are possible in light of the above teachings and, therefore, are within the scope of the appended claims.

[0516] These and other changes may be made in light of the above detailed description. In general, in the following claims, the terms used should not be construed to limit the scope to the specific embodiments disclosed in the specification and the claims.

[0517] The entire disclosure of each document cited (including patents, patent applications, journal articles, abstracts, manuals, books or other disclosures) in the Background, Detailed Description, and Examples is herein incorporated by reference in their entireties.

[0518] Efforts have been made to ensure accuracy with respect to the numbers used (e.g. amounts, temperature, concentrations, etc.) but some experimental errors and deviations should be allowed for. Unless otherwise indicated, parts are parts by weight, molecular weight is average molecular weight; temperature is in degrees centigrade; and pressure is at or near atmospheric.

The application's sequence listing, which the Patent Office published only in electronic form, follows.

SEQUENCE LISTING (888 sequences)

SEQ ID NO: 1 - protein, 867 aa, Adiantum pedatum
MALVDYGKLFEDLNQISMGVLDRVEFSEVMVIHRMYVRLADLNVGQLEGAEKVKRLYVFADVVELPVVEWRWPPQIPGSVTVIILCRLLQWPTDGRQSDTELHLTFMKLHAIQREENRWEITAADGMNWGVYIHAEEVQVGVLTMSWSSVLRVSALRSVITSGFRAVSVFEVPGSVRSTLGATLRPDHALYSTTMQATPNASHISAFNLRIVSPSAYRVCPLQNDTDTYLGIPADVAAVLPVDVVTDPNILLGMQTTVHIAELVKACHPSPDVVSAVGEHLNWLNKLLLPLKESTQLQGSESYKECLALLGRVHAAMKMVRIGLVVPQLQYRMYGSLINQMAQVAQNYDREFKQFKLFIIQNQILGSYLLQQNRAFAERELQMESFHAAVISQRREELDNTFAKMDRLSGQMEAESSAMEQAKKEMDEGLRQFQNRQVANALFAVLSAVAQIGLAFLTAGATAPGAVASAGQAVSIAGQAAQGLRRVVEILEQLEAVMEVVAAVKDLVDSLEQVGQIVDAPVMPELPSEADWSIFVNEVEAVAEGMPTEVSEVPVWRAKCKNVAALGREMSITAVQMSELQYDIWVQGMMRDMARSQADRLAAIQPADLTNYLEMATQMDMRTTRMLLGLLNILRIQNAALRYEYLLMPTELTTWPLGMDTVGDLLIAQENAALIGLMQLGPSSDFTSRHVVKDIPVNLLLDGEDWEFEIPVQAGMSSFPSSWSRVRIRHLEMHFVKEASGIGGEIIHQPTTQTGTVYILLQGSTIFHDRRRDQVLPFQAAAPLNYHYAYRLDTGDSTLTNEPSEQFANKFMQMTPFTRWRLRLSASAKENAGLAFPTATALDSTTQIVITFHVTAIRQIDWRHDEE

SEQ ID NO: 2 - DNA, 2601 bp, Adiantum pedatum
  source 1..2601: mol_type = unassigned DNA
atggctctcgtggattacggcaagcttttcgaggatctgaaccagataagcatgggtgtactggatcgggtagagttttcagaggtgatggtgatccacaggatgtatgtgaggctagctgatctgaatgtggggcagctcgagggagccgagaaagtgaagcggttgtatgtgtttgcggacgtggtggagctaccagtcgtggaatggcggtggccgccgcaaataccaggatcggtgacggtgatcatattgtgtcgtcttcttcaatggccaactgatgggaggcagtcggacaccgagctccacctgacattcatgaagttgcatgccatacaacgagaggaaaatcggtgggagataaccgcagcagatggcatgaactggggagtttacatacacgcagaggaagtacaggttggcgtgctgacaatgtcatggtcttcggtacttagagtttcggcacttcgctctgttataacctccggctttcgcgccgttagtgtgtttgaggtaccgggaagtgtaaggtccacccttggagctactttaaggcccgatcacgccttatatagtacaactatgcaagccacacccaacgcatcgcatattagtgcttttaaccttcgcatagtttccccgtcggcatatcgtgtttgtcctctccaaaatgacacagatacctacttaggtattccagcagacgtggcggcagttcttccagtagacgtggtgactgatcctaacatcttgctgggcatgcagacaacggtacacattgcggagctagtcaaggcatgtcatccgtcacccgatgttgtgagcgctgtaggggagcacctgaactggctcaacaaactcttactcccacttaaggaatcgactcagttgcaaggaagcgagtcgtacaaggagtgccttgcactcttgggtcgtgttcacgctgcgatgaagatggtgagaattggcttagtagtgccccagctgcaatacagaatgtacggtagcctcatcaaccaaatggcccaagtagcacaaaactacgaccgagaattcaagcaattcaaattattcatcatccaaaatcaaatccttggcagctatttgctgcagcagaacagggcatttgctgagagggagctgcagatggagagctttcatgctgctgtcatttctcaaagaagggaggagttggacaatacattcgcaaagatggaccgattgagcgggcaaatggaggcagagagtagtgcaatggagcaagccaaaaaggaaatggacgaaggattgaggcagttccagaataggcaagttgcgaacgccctctttgccgttcttagcgctgtagctcagattgggcttgcattccttacggctggtgcaacggctcctggagctgtggcgtcggcggggcaagctgtgagcatagcaggtcaggcggcgcaaggtctgcgaagggtggtggaaattctagagcagctggaggctgtgatggaggttgtggctgctgtgaaggacctcgtggattcattggaacaggtaggtcagattgtggacgcaccggtgatgccggaattgccctcagaggcggactggtccatttttgtgaacgaggtggaggccgtggcagagggcatgccaacggaagtctcggaggttccggtgtggagggccaagtgcaagaatgtggctgcactgggtcgggagatgagcatcacggcagtacagatgtcggagctgcagtatgacatctgggtgcaaggcatgatgcgggatatggctcgaagccaggcagacaggctggccgcaattcaacccgcggaccttaccaactatttggagatggctacccagatggatatgcggactacgaggatgctgctggggctcctcaacatattgcgcatccagaatgcggcgctcaggtacgagtatcttctaatgcccacggagctcacaacatggccactgggtatggataccgtgggtgacttgctcatcgcgcaggagaatgctgcactgataggattaatgcagctagggccctcatctgatttcacgagcaggcatgtggtgaaagacatacctgtgaacttgctgctcgatggcgaggattgggagtttgagattcctgtgcaagctggcatgtccagcttcccttccagctggtctcgcgtccgtattcggcacctggagatgcactttgtgaaggaggccagcggtattggtggtgagattatccaccagcctaccacccagactgggaccgtttacatccttctgcagggttccactatcttccatgaccgcagaagagaccaggtgttgccttttcaggccgctgctccgctcaactaccattacgcgtaccgcctcgacaccggcgactccactctcacaaacgaaccctctgaacagtttgccaacaagttcatgcagatgacacccttcacccgttggaggcttcgtctgtctgcgtccgcaaaagagaatgcaggattagcctttcccacggctacagcacttgactccactacccagattgtcatcactttccatgttacggccatcagacaaattgactggcggcacgacgaagag

SEQ ID NO: 3 - protein, 886 aa, Microsorum sp.
  source 1..886: note = Microsorum musifolium
MEYSSLYGDVNQVSLRFQNMEFSEVMVVHRMHVRLEELDMTGVEGIEKVKRLYVLADVVELPSTATQVFQYLRLPASISAIILCRVLYIPEVDQRPHMAQCSLDFPFMRLHVVGSVHENVGGVMQAFSSDATPSNIGIYLHADRFIYRQATSPASNFVLPLDVRVSFGSSTYSGPTIRPDWQNLNVSNISYGPQHLSKGPPLTSSDSDLQRSDEIELLAQQDVWSPLLHVAFSPTALPGNIPGTQGLFRPSSACSFFHVPPPDVPANVLTDPSIILGMQMNMLIAELVLAAHNSPQVMNVITKHVLWLNKILLQVASPNDDILALLFRIQAFMKMAKQPRFVVPRLQYHMYGSLINRMVQVAQNYDQEFKQLKLFIAQNEILGSYLLQQNRAFAEREKEMSAFHSQVVSMRRSELQSAIQTMDNLSLQMESESEAMNEAQENMVEAIQEYERKLLARALFSVIGAIASVALAFATGGATAPGAVAAAGGAVAAAGRLAAGLQKVVDILQGLQAVMEVVVAIRDIVESLKNMGQLVEAPEMPEMPTDADWLIFVNEVEAVAEQVPTEVAEVPVWKAKCKNVAVLGQAMCTTAAYISELQYQITVEKMLQEIAQRQADRLVGISAADLSSYTEMASQIDMRTTRILLELIKMLYIQNAAIKYEYLYDANEKLNSWPVSMETVWTMLLQQENAALLGLLDLGPTNDFTVTYAVKDIPTKLLVDGFDWNFEIAVEDSAIFPSGWSRVRIRYVELKFDQQGADSSNIVIHQPSTNTGLVYMLLQGSRFLHDRKHEEVMDYEASLGPVYAYAYDLNTGATTLNNIPSQQYANTFMQMTPFNAWRLRLSASAVENQGLVFPTATSPDNTTQISITFYVTAIRRIDHRQEGDVE

SEQ ID NO: 4 - DNA, 2658 bp, Microsorum sp.
  source 1..2658: mol_type = unassigned DNA; note = Microsorum musifolium
atggaatatagcagcttgtacggtgatgtgaaccaagtgagcctgaggttccagaacatggagttctctgaggtcatggtggtgcatcggatgcatgtgcgcctcgaggagcttgacatgacgggggtggagggcatcgagaaggtgaaacgcctgtacgtgctggcggacgtggtggagctgccttccacagccacccaggtgtttcagtatctgcgccttcctgcctccatttcagcgattatcctctgccgtgttctctatatccctgaagttgatcagaggccccacatggctcaatgctcgctcgacttcccgttcatgcgcctccatgtcgtcggatctgtacacgagaatgttgggggtgttatgcaagccttttcctccgacgccacccccagcaatattggcatctacctccatgctgaccgcttcatctaccgccaggccacatctccggccagcaactttgtcttgcccctggatgtaagggtcagctttggcagctctacctactcgggcccaaccatccgtcccgactggcaaaaccttaatgtctccaacatcagctacgggccacagcatttgtccaagggcccacccctcacatcctcagactccgacttgcagagatctgacgagatcgagctcctggcgcagcaagatgtttggagccctcttttacatgtcgcgtttagcccgactgcactacctggcaacatcccgggtacacaaggactattccgaccctcctctgcatgcagcttcttccatgtgccgccaccggatgtccctgcgaacgtgctcactgatccttccatcatcttgggcatgcaaatgaacatgctcattgccgagcttgtcttggctgctcacaattcgccgcaggtcatgaacgtcatcactaagcatgtgctatggctcaacaagatcttgcttcaggttgcttcacccaatgatgatattttagcactcttgtttcgtatccaagcattcatgaagatggcaaagcaaccgcggtttgtggttccacggttgcagtaccacatgtacggtagccttatcaatcgaatggtgcaagtagcccagaattatgaccaggagttcaagcaactcaagcttttcatcgcacaaaatgagattttgggaagctatttgctacaacaaaatagggcttttgcagaaagggagaaggaaatgagtgcttttcactcgcaggtcgtgtcgatgaggagatctgagcttcagtctgccatacaaacaatggacaatttgagtttgcaaatggaatcagagagtgaggcgatgaacgaagcccaggagaacatggttgaagcaattcaagagtatgaaaggaaattacttgcaagagctctattttctgtgattggggcaatagcaagcgttgctcttgcatttgccactggtggtgcaactgcaccgggggcagtggcagcagccggaggggctgttgctgcagcagggaggttggcagcagggctccaaaaggttgtggacatcctacaaggcttgcaagcggtcatggaggttgtggtagccataagagacatcgtagaatcattgaaaaacatgggtcaactagtagaagctcccgagatgccagagatgccaacggatgcggactggttaatttttgtaaatgaggtggaggcagtggcagagcaagtgccaacagaagtggcagaggtcccagtgtggaaggctaagtgcaagaatgtggctgtgctagggcaagcaatgtgcaccacagcagcatatattagtgagctacagtatcagatcacggtggaaaagatgctacaagagattgcacagcgccaagcagacaggttggtggggatatcagcagcagatctatcgagctacacagagatggcatcacaaatagacatgcgtacaacccgaatcctccttgaactcatcaagatgttgtacattcaaaatgcagcaattaagtatgagtacttgtatgatgctaatgagaagcttaattcatggccagtgagcatggagactgtatggaccatgctcttgcaacaagagaatgcagctctcttgggcttgctagacttggggcccaccaatgatttcactgtaacctatgctgttaaagacatacctaccaagttgttagtagatgggtttgattggaattttgagatcgcggtggaggattctgcaatctttccatcaggatggtctcgtgttcgcatacgatatgttgagcttaaatttgaccaacaaggtgctgatagtagtaacattgtcatccaccagcctagcactaacactggcttagtctacatgctcttacaaggctcccggttcctccatgaccgcaaacatgaggaggtgatggactatgaggcaagcttgggacctgtatatgcatatgcttatgacctcaacactggtgcaaccactctcaacaacatcccctcacagcaatatgccaacacatttatgcaaatgacacccttcaacgcctggagacttcgcctctctgcctctgctgtggaaaatcagggattggtgtttcctacagcaacttctcctgacaatactacccaaatttccatcacattctatgtcactgctattcgacgcatagatcatcgacaagagggtgatgtggag

SEQ ID NO: 5 - protein, 853 aa, Adiantum trapeziforme
MDYSTLYRDLNQISIGVDRVEFSEVMVIHRMYVRLSDLNVGELPGAGRVKRVYVFADVVELAPRATLRDQMHMPGSVTVIVLCRLLQFPIDGSQATTLRLPFMQLHARVIEQNVKSEITATDGMNWGIYIYGEKVERSPLLPSNAILAVWADRCTITSARHNHVNAPGRIISTFTLGSGVTGITSMHGEPSLDPWNGVSLDSASPTAFSALPRQSRNISFTSIPVEVVTDPSILLGMQTTVLIAELVKVCRPPSPDMMSAVAEHALWLNDVLLQVVQNESQLQGTAPYNECLALLGRIECVMKIGRFVSVVPQLQYRMYGNLIKQMAQVAQNYDQEFKQFKLFIVQNQILGSYLLQKNKALADRELQMESFHSAVISQRRQELNTAIAKMERMSLQMEEENRAMEQAQKEMEEGLREFQNRQVARAVFAVLKAVAMIALVFVTAGATAPGAAASAGQAVSIAGQAAQALRRVVEILEGLEAVMEVVAAVKDLVDSLEQVGQIVGAPEMPDMPSEADWSIFVNEIEAVAEGMPTEVSEVPAWKAKCKNMAALGREMSITAVQISELQYEIWVQGLMRDIARSHADRLAAIQPVDLTNHLEMATHMDMRTTSMLIGLLNMLRIQNAALMYEYLLTPTELTVWPLGMDTVANLLIAQENAALVGLIQLGQSSNFTSRHVVKGIPVSLLLDGEDWEFEIPVQAGMSSFPFNWTRVRIRHLEMQFAQEASGGGGGEIIHQPSTRSGIVYILLQGSTIFHDRRRDEVMTFQAADPLNFQYAYRLDTGEATLTNEPSEDFANTFMQMTPFTRWRLRLSASASENAELAFPTATAPDSTTEVVITFHVTAIRQVDWRQEEE

SEQ ID NO: 6 - DNA, 2559 bp, Adiantum trapeziforme
  source 1..2559: mol_type = unassigned DNA
atggattacagcacgctttacagggacctgaaccagataagcatcggtgtggaccgggtagagttctcagaggtgatggtgatccacaggatgtatgtaaggttgtctgatctgaatgtgggggagctccccggagccgggagagtgaagcgggtgtacgtgtttgcggatgtggtggagcttgcaccgcgtgcgacgctgcgggatcagatgcatatgccaggatcggtgacagtgatcgtattgtgtcgtcttcttcaatttccaatcgatgggtcgcaagctacaactctccggctgcctttcatgcagttgcatgccagagtcatagagcaaaatgtaaagtcggagataacagcaacagatggcatgaattggggaatctacatatacggggagaaagtagagaggagcccgctccttcctagcaatgcaatccttgcagtttgggcagatcgctgtactataacctcagcccgtcacaatcatgttaacgcacctgggagaataatatcgactttcacacttgggtcgggagtaacgggtataacctctatgcacggggaacccagtttggacccttggaatggtgtttctctcgactcagcttcccctacggcatttagtgctttacctcgccaaagtaggaatatatccttcacaagtattccagtagaggtggtgactgatcctagcatcttgctgggcatgcagaccaccgtgctcattgcggagctagtcaaggtatgtcgcccaccatcacccgacatgatgagtgctgtagcggagcacgcgctttggctcaatgatgtcttactccaagttgtccagaacgaatctcagttgcaagggactgcgccctacaacgagtgccttgcacttttgggtcgcattgaatgtgtgatgaaaatcgggagatttgtctcagtagtgcctcagctgcaatacagaatgtatggtaacctcatcaaacaaatggcccaagtagcacaaaactacgaccaagaattcaagcaattcaagttattcatcgtccaaaaccaaatccttggcagctatttgcttcagaagaacaaggcattagctgacagggagctgcagatggagagctttcattcagcggtcatttctcaaagaaggcaggagttgaatactgccatcgcaaagatggagcgaatgagcttgcaaatggaggaagagaatagagcaatggagcaagctcaaaaggaaatggaagaaggattgagggagttccagaataggcaagttgcaagggccgtatttgccgttcttaaagccgtagctatgattgcgcttgtattcgtcacggctggtgcgacggctcctggagctgcggcgtccgcggggcaagctgtgagcatagcaggtcaggccgcacaagctctgcgaagggtggtggaaattctagaggggctggaggctgtgatggaggttgtggctgctgtgaaggaccttgtggattcattggaacaggtaggtcagattgtgggggcaccggagatgccggacatgccctcggaggcggactggtccatttttgtgaatgagattgaggccgtggcagaggggatgccgacggaagtctcggaggttccggcatggaaggccaagtgcaagaatatggctgcactgggtagggagatgagcatcacggcagtacagatttctgagctccagtatgagatctgggtgcaaggcttgatgcgggatatagctcgaagccatgcagacaggttggctgcgattcaacctgtggaccttaccaaccatttggagatggccacacacatggatatgcggactacaagtatgctgatagggctcctcaacatgctgcgcatccagaatgcggcactcatgtacgagtaccttctaacacccacggagctcacagtatggccactgggtatggataccgtggccaacttgctcattgcgcaggagaatgctgcactggtgggattaattcagctagggcaatcgtcgaattttacgagcagacatgtggtgaaaggcatacctgtgagcttactgctcgatggtgaggattgggaattcgagatccctgtgcaagctggcatgtccagcttccctttcaactggactcgggtcaggattcggcacctggagatgcaatttgcgcaggaggcgagtggtggtggtggtggcgagattatccaccagccttccacccggtcggggattgtttacatcctcctgcagggctccactatcttccatgaccgcagaagagatgaggtgatgacctttcaggcagcggacccgctcaacttccaatatgcgtaccgcctcgacactggcgaagccactctaacgaatgagccctcggaagactttgcgaacacgttcatgcagatgacacccttcactcgctggaggcttcgtctctctgcgtccgcctcagagaatgcagaattagcgtttccaacagctacagctcccgactccactaccgaggttgtcatcacgttccatgttacggcaattagacaagttgactggcggcaagaggaggag

SEQ ID NO: 7 - protein, 852 aa, Adiantum trapeziforme
MDYSTLYRDLNQISMPLDRVEFSEVMVIHRMYLRLSDLNVGELPGAERVKRLYVLADVVELATFAHPQLLNTRMPGSVTVIILCRLLQFPTDGSFAAWLELPFMELHTLIEQYRSEIKAADDAKWGTYVHAEEVQLSPLFNGWPYLVVEAQRCIITAAMHNTFNRPGWVRSITQFTTDQSGRVDTTLLARTEFGHIDLPLETDSPTAFSVSHRQSTNLPVEYTGIPVEVVTDPNILMGMQTSVHIAELVKACYPSPELVSAVGVHVNWLNEVLLRVVQKESQLQGTEAYNECLALLGRIQCVMKMGPFVSVVPQLQYRMYGSLIRQMAQVAQNYDQDFRQLKLFIAQNQILGSYLLQQNKAFADREVQMESFHSAVISQRRQELDDAIAKMDRLSLQMEEEDRAMEQARKEMEEGLKQFQNEQVARAVFAVLKSVAMIALAFVTAGATAPGAAASAAQAVNIAGQAAQALRRVVEILEGLEAVMEVVAAIKHLVDALDQVSQIVDAPPMPDMPSEADWSIFVNEIEAVAEGMPTEVSEVPAWKAKCKNVAALGREMCITAEQISQLQYDIWVQGLLRDIAQSHADRLAAIQPANLTNYLEMAIQMDMRTTRILIGLLNIMRIQNAALMYEYLLTPTQLTAWPLRMDTVANLLITHESAALSGLAQLGPPSDFTSRHVVKGIPVSLLLDGGDWEFEIPVQGGMSSFPSSWTRVRIRHLEMHFVQEASGGGEIIHQPATQTGTIYILLQGSTVFHDRRREEVMTFQAAVPLNYHYAYRLDTGEATLTNEPSEQFANTFMQMTPFTHWRLRLSASAAENKGLAFPTATAPDSTTEIAITFHVTAIRQIDWRQEEE

SEQ ID NO: 8 - DNA, 2556 bp, Adiantum trapeziforme
  source 1..2556: mol_type = unassigned DNA
atggattacagcacgctttacagggatctgaaccagataagcatgcccctggatcgggtagagttctcagaggtgatggtaatccacaggatgtacttgaggttatctgatctgaatgtgggggagctccccggagccgagagggtgaagcggttgtatgtgttggcagacgtggtggagctcgcaacatttgcgcatccacagttgcttaatacgcggatgccaggatcggtgacggtgatcattctgtgtcgtcttcttcagtttccaactgatgggtcgttcgctgcttggctcgagctgccgttcatggagttgcacacactcatagaacaatacaggtcagagataaaagcagcagatgacgcgaaatggggaacgtatgtacacgcggaggaagtacagctcagcccgctgtttaatgggtggccttatctggttgttgaggcacagcgctgtattataaccgcggccatgcacaatacatttaaccgccctgggtgggttcgctccattactcaatttacaactgatcagtccggtcgggtagataccacactgctcgcacgaacagaattcggccatattgatctaccactcgaaacagattccccaacggcattcagtgtttcacaccgccaaagtacgaatttgcccgtagagtacaccggtattccagtggaggtggtgaccgatcctaacatcttgatgggcatgcaaaccagcgtgcacattgcggagctagtgaaggcatgttacccgtcaccagaattagtgagcgctgtaggggtgcacgtgaattggctcaacgaagtcttgctccgagttgtccagaaggaatctcagttgcaagggaccgaggcctacaacgagtgccttgcgcttttaggtcgcattcaatgtgtcatgaagatggggccgtttgtctcggtagtgccgcagctgcaatacagaatgtatggtagcctcatcagacaaatggcccaggtagcacagaactacgaccaagatttcaggcagctcaagttattcattgcccaaaaccaaatccttggcagctatttgctgcagcagaacaaggcctttgctgacagagaggtgcagatggagagctttcattcagcggtcatttctcaaagaaggcaggagttggacgacgccatcgctaagatggaccgactgagcttgcagatggaggaagaggacagagcaatggagcaagcccgaaaagaaatggaagaaggattgaagcagttccagaatgagcaagttgcaagggctgtgttcgctgttcttaaatctgtagctatgattgcgctcgcattcgtcacggctggtgcaacggctcctggggctgcagcatctgcagcgcaagctgtgaacatagccggtcaagcggcacaagctctgcgaagggtggtggaaattctagaggggctcgaggctgtgatggaggttgtggctgctataaagcaccttgtggatgctctggaccaggtaagtcagattgtggatgcaccacctatgccagacatgccctcggaggcggactggagtatttttgtgaatgagattgaagccgtggcagaggggatgccgacggaagtctcggaggttccggcgtggaaggccaagtgcaagaatgtggctgcactgggtagggagatgtgcatcacggcagaacagatttcccagctccagtatgacatctgggtgcaaggcttgttgcgggatatagctcaaagccacgcagaccggctggcagcgattcaacctgctaatcttaccaactatttggagatggcaatacagatggatatgcggactacgaggatactgatagggctcctcaacataatgcgcatccagaatgcggcacttatgtatgagtaccttctaacgcccacgcagctcactgcatggccgctgagaatggatactgtggccaacttgctcatcacgcacgagagtgctgcactgtcaggattagctcagttagggcccccatcggacttcacgagcaggcatgtagtgaaaggcatacctgtgagcttgcttctagacggtggggattgggaatttgagattcctgtgcaaggtggcatgtccagtttcccttccagctggactcgagtgcggattcggcacctggagatgcactttgtgcaggaggcgagcggtggcggcgagattatccaccagcctgccacccagacggggaccatttacatcctcctgcagggctccactgtcttccatgatcgcagaagggaggaggtgatgacctttcaggcagcggttccgctcaactaccattacgcgtaccgcctcgacactggagaagccactcttacgaacgagccctcggaacagtttgccaacacattcatgcagatgacaccgttcactcactggaggctacgtctgtctgcgtccgcagcggagaataaaggattagcctttcccacagctacagctcccgactccaccactgagattgccatcactttccatgttacggccattagacaaattgactggcggcaagaggaggag

SEQ ID NO: 9 - protein, 851 aa, Adiantum trapeziforme
MDYSTLYRDLNQISIGVDRVEFSEVMVIHRMYVRLSDLNVGELPGAGRVKRVYVFADVVELAPRATLRDQMHMPGSVTVIVLCRLLQFPIDGSQATTLRLPFMQLHARVIEQNVKSEITATDGMNWGIYIYGEKVERSPLLPSNAILAVWADRCTITSARHNHVNAPGRIISTFTLGSGVTGITSMHGEPSLDPWNGVSLDSASPTAFSALPRQSRNISFTSIPVEVVTDPSILLGMQTTVLIAELVKVCRPPSPDMMSAVAEHALWLNDVLLQVVQKESQMQGTAPYNECLALLGRIECVMKIGRFVSVVPQLQYRMYGNLIKQMAQVAQNYDQEFKQFKLFIIQNQIFGSYLLQQNKAFADRELQMESFHSAVISQRRQELNTAIAKMERMSLQMEEENRAMEQAQKEMEEGLREFQNRQVARAVFAVLKAVAMIALAFVTAGATAPGAAASAGQAVSIAGQAAQALRRVVEILEGLEAVMEVVAAVKDLVDSLEQVGHIVGAPEMPDMPSEADWSIFVNEIEAVAEGMPTEVSEVPAWKAKCKNMAALGREMSITAVQISELQYEIWVQGLMRDIARSHADRLAAIQPVDLTNHLEMATHMDMRTTSMLIGLLNMLRIQNAALMYEYLLTPTELTVWPLGMDTVANLLIAQENAALVGLIQLGPSSNFTSRHVVKGIPVSLLLDGEDWEFEIPVQAGMSSFPFNWTRVRIRHLEMQFAQEASGGDEIIHQPSTRSGIVYILLQGSTIFHDRRRDEVMTFQAADPLNFQYAYRLDTGEATLTNEPSEEFANTFMQMTPFTRWRLRLSASASENAELAFPTATAPDSTTEVVITFHVTAIRQVDWRQEEE

SEQ ID NO: 10 - DNA, 2553 bp, Adiantum trapeziforme
  source 1..2553: mol_type = unassigned DNA
atggattacagcacgctttacagggacctgaaccagataagcatcggtgtggaccgggtagagttctcagaggtgatggtgatccacaggatgtatgtaaggttgtctgatctgaatgtgggggagctccccggagccgggagagtgaagcgggtgtacgtgtttgcggatgtggtggagcttgcaccgcgtgcgacgctgcgggatcagatgcatatgccaggatcggtgacagtgatcgtattgtgtcgtcttcttcaatttccaatcgatgggtcgcaagctacaactctccggctgcctttcatgcagttgcatgccagagtcatagagcaaaatgtaaagtcggagataacagcaacagatggcatgaattggggaatctacatatacggggagaaagtagagaggagcccgctccttcctagcaatgcaatccttgcagtttgggcagatcgctgtactataacctcagcccgtcacaatcatgttaacgcacctgggagaataatatcgactttcacacttgggtcgggagtaacgggtataacctctatgcacggggaacccagtttggacccttggaatggtgtttctctcgactcagcttcccctacggcatttagtgctttacctcgccaaagtaggaatatatccttcacaagtattccagtagaggtggtgactgatcctagcatcttgctgggcatgcagaccaccgtgctaattgcggagctagtcaaggtatgtcgcccaccatcacccgacatgatgagtgctgtagcggagcacgcgctttggctcaatgatgtcttacttcaagttgtccagaaagaatcgcagatgcaagggactgcgccctacaacgagtgccttgcacttttgggtcgcattgaatgtgtgatgaaaatcgggagatttgtctcagtagtgcctcagctgcaatacagaatgtatggtaacctcatcaaacaaatggcccaagtagcacaaaactacgaccaagaattcaagcaattcaagttattcatcatccaaaaccaaatctttggcagctatttgcttcagcagaacaaggcatttgctgacagggagctgcagatggagagctttcattcagcggtcatttctcaaagaaggcaggagttgaatactgccatcgcaaagatggagcgaatgagcttgcaaatggaggaagagaatagagcaatggagcaagctcaaaaggaaatggaagaaggattgagggagttccagaataggcaagttgcaagggccgtatttgccgttcttaaagccgtagctatgattgcgcttgcattcgtcacggctggtgcgacggctcctggagctgcggcgtccgcggggcaagctgtgagcatagcaggtcaggccgcacaagctctgcgaagggtggtggaaattctagaggggctggaggctgtgatggaggttgtggctgctgtgaaggaccttgtggattcattggaacaggtaggtcacattgtgggggcaccggagatgccggacatgccctcggaggcggactggtccatttttgtgaatgagattgaggccgtggcagaggggatgccaacggaagtctcggaggttccggcatggaaggccaagtgcaagaatatggctgcactgggtagggagatgagcatcacggcagtacagatttctgagctccagtatgagatctgggtgcaaggcttgatgcgggatatagctcgaagccatgcagacaggttggctgcgattcaacctgtggaccttaccaaccatttggagatggccacacacatggatatgcggactacaagtatgctgatagggctcctcaatatgctgcgcatccagaatgcggcactcatgtacgagtaccttctaacacccacggagctcacagtatggccactgggtatggataccgtggccaacttgctcattgcgcaggagaatgctgcactggtgggattaattcagctagggccctcgtcgaattttacgagcagacatgtggtgaaaggcatacctgtgagcttgctgctcgatggtgaggattgggagttcgagatccctgtgcaagctggcatgtccagcttccctttcaactggactcgggtcaggattcggcacctggagatgcaatttgcgcaggaggcgagtggtggtgacgagattatccaccagccttccacccggtcggggattgtttacatcctcctgcagggctccactatcttccatgaccgcagaagagatgaggtgatgacctttcaggcagcggacccgctcaacttccaatatgcgtaccgcctcgacactggcgaagccactctaacgaatgagccctcggaagagtttgcgaacacgttcatgcagatgacacccttcactcgctggaggcttcgtctctctgcgtccgcctcagagaatgcagaattagcgtttccaacagctacagctcccgactccactaccgaggttgtcatcacgttccatgttacggcaatcagacaagttgactggcggcaagaggaggag

SEQ ID NO: 11 - protein, 851 aa, Adiantum trapeziforme
MDYSTLYRDLNQISIGVDRVEFSEVMVIHRMYVRLSDLNVGELPGAGRVKRVYVFADVVELAPRETLRDQMHMPGSVTVIILCRLLQFPIDGSQATTLRLPFMQLHARVIEQNVKSEITATDGMNWGIYIYGEKVERSPLLPSNAILAVWADRCTITSARHNHVNAPGRIISTFTLGSGVTGITSMHGEPSLDPWNGVSLDSASPTAFSALPRQSRNISFTSIPVEVVTDPSILLGMQTTVLIAELVKVCRPPSPDMMSAVAEHALWLNDVLLQVVQKESQMQGTAPYNECLALLGRIECVMKIGRFVSVVPQLQYRMYGNLIKQMAQVAQNYDQEFKQFKLFIIQNQIFGSYLLQQNKAFADRELQMESFHSAVISQRRQELNTAIAKMERMSLQMEEENRAMEQAQKEMEEGLREFQNRQVARAVFAVLKAVAMIALAFVTAGATAPGAAASAGQAVSIAGQAAQALRRVVEILEGLEAVMEVVAAVKDLVDSLEQVGHIVGAPEMPDMPSEADWSIFVNEIEAVAEGMPTEVSEVPAWKAKCKNMAALGREMSITAVQISELQYEIWVQGLMRDIARSHADRLAAIQPVDLTNHLEMATHMDMRTTSMLIGLLNMLRIQNAALMYEYLLTPTELTVWPLGMDTVANLLIAQENAALVGLIQLGPSSNFTSRHVVKGIPVSLLLDGEDWEFEIPVQAGMSSFPFNWTRVRIRHLEMQFAQEASGGDEIIHQPSTRSGIVYILLQGSTIFHDRRRDEVMTFQAADPLNFQYAYRLDTGEATLTNEPSEEFANTFMQMTPFTRWRLRLSASASENAELAFPTATAPDSTTEVVITFHVTAIRQVDWRQEEE

SEQ ID NO: 12 - DNA, 2553 bp, Adiantum trapeziforme
  source 1..2553: mol_type = unassigned DNA
atggattacagcacgctttacagggacctgaaccagataagcatcggtgtggaccgggtagagttctcagaggtgatggtgatccacaggatgtatgtaaggttgtctgatctgaatgtgggggagctccccggagccgggagagtgaagcgggtgtacgtgtttgcggatgtggtggagcttgcaccgcgcgagacgctgcgggaccagatgcatatgccaggatcggtgacagtgatcatattgtgtcggcttcttcaatttccaatcgatgggtcgcaagctacaactctccggctgcctttcatgcagttgcatgccagagtcatagagcaaaatgtaaagtcggagataacagcaacagatggcatgaattggggaatctacatatacggggagaaagtagagaggagcccgctccttcctagcaatgcaatccttgcagtttgggcagatcgctgtactataacctcagcccgtcacaatcatgttaacgcacctgggagaataatatcgactttcacacttgggtcgggagtaacgggtataacctctatgcacggggaacccagtttggacccttggaatggtgtttctctcgactcagcttcccctacggcatttagtgctttacctcgccaaagtaggaatatatccttcacaagtattccagtagaggtggtgactgatcctagcatcttgctgggcatgcagaccaccgtgctaattgcggagctagtcaaggtatgtcgcccaccatcacccgacatgatgagtgctgtagcggagcacgcgctttggctcaatgatgtcttacttcaagttgtccagaaagaatcgcagatgcaagggactgcgccctacaacgagtgccttgcacttttgggtcgcattgaatgtgtgatgaaaatcgggagatttgtctcagtagtgcctcagctgcaatacagaatgtatggtaacctcatcaaacaaatggcccaagtagcacaaaactacgaccaagaattcaagcaattcaagttattcatcatccaaaaccaaatctttggcagctatttgcttcagcagaacaaggcatttgctgacagggagctgcagatggagagctttcattcagcggtcatttctcaaagaaggcaggagttgaatactgccatcgcaaagatggagcgaatgagcttgcaaatggaggaagagaatagagcaatggagcaagctcaaaaggaaatggaagaaggattgagggagttccagaataggcaagttgcaagggccgtatttgccgttcttaaagccgtagctatgattgcgcttgcattcgtcacggctggtgcgacggctcctggagctgcggcgtccgcggggcaagctgtgagcatagcaggtcaggccgcacaagctctgcgaagggtggtggaaattctagaggggctggaggctgtgatggaggttgtggctgctgtgaaggaccttgtggattcattggaacaggtaggtcacattgtgggggcaccggagatgccggacatgccctcggaggcggactggtccatttttgtgaatgagattgaggccgtggcagaggggatgccaacggaagtctcggaggttccggcatggaaggccaagtgcaagaatatggctgcactgggtagggagatgagcatcacggcagtacagatttctgagctccagtatgagatctgggtgcaaggcttgatgcgggatatagctcgaagccatgcagacaggttggctgcgattcaacctgtggaccttaccaaccatttggagatggccacacacatggatatgcggactacaagtatgctgatagggctcctcaatatgctgcgcatccagaatgcggcactcatgtacgagtaccttctaacacccacggagctcacagtatggccactgggtatggataccgtggccaacttgctcattgcgcaggagaatgctgcactggtgggattaattcagctagggccctcgtcgaattttacgagcagacatgtggtgaaaggcatacctgtgagcttgctgctcgatggtgaggattgggagttcgagatccctgtgcaagctggcatgtccagcttccctttcaactggactcgggtcaggattcggcacctggagatgcaatttgcgcaggaggcgagtggtggtgacgagattatccaccagccttccacccggtcggggattgtttacatcctcctgcagggctccactatcttccatgaccgcagaagagatgaggtgatgacctttcaggcagcggacccgctcaacttccaatatgcgtaccgcctcgacactggcgaagccactctaacgaatgagccctcggaagagtttgcgaacacgttcatgcagatgacacccttcactcgctggaggcttcgtctctctgcgtccgcctcagagaatgcagaattagcgtttccaacagctacagctcccgactccactaccgaggttgtcatcacgttccatgttacggcaatcagacaagttgactggcggcaagaggaggag

SEQ ID NO: 13 - protein, 854 aa, Adiantum sp.
  source 1..854: note = Adiantum peruvianum
MDYSTLYRDLNQISIGVDRVEFSEVMVIHRMYVRLSDLNVGELPGAGRVKRVYVFADVVELAPRATLRDQMHMPGSVTVIVLCRLLQFPIDGSQATTLRLPFMQLHARVIEQNVKSEITATDGMNWGIYIYGEKVERSPLLPSNAILAVWADRCTITSARHNHVNAPGRIISTFTLGSGVTGITSMHGEPSLDPWNGVSLDSASPTAFSALPRQSRNISFTSIPVEVVTDPSILLGMQTTVLIAELVKVCRPPSPDMMSAVAEHALWLNDVLLQVVQKESQMQGTAPYNECLALLGRIECVMKIGRFVSVVPQLQYRMYGNLIKQMAQVAQNYDQEFKQFKLFIIQNQIFGSYLLQQNKAFADRELQMESFHSAVISQRRQELNTAIAKMERMSLQMEEENRAMEQAQKEMEEGLREFQNRQVARAVFAVLKAVAMIALAFVTAGATAPGAAASAGQAVSIAGQAAQALRRVVEILEGLEAVMEVVAAVKDLVDSLEQVGHIVGAPEMPDMPSEADWSIFVNEIEAVAEGMPTEVSEVPAWKAKCKNMAALGREMSITAVQISELQYEIWVQGLMRDIARSHADRLAAIQPVDLTNHLEMATHMDMRTTSMLIGLLNMLRIQNAALMYEYLLTPTELTVWPLGMDTVANLLIAQENAALVGLIQLGPSSNFTSRHVVKGIPVSLLLDGEDWEFEIPVQAGMSSFPFNWTRVRIRHLEMQFAQEASGGDEIIHQPSTRSGIVYILLQGSTIFHDRRRDEVMTFQAADPLNFQYAYRLDTGEATLTNEPSEEFANTFMQMTPFTRWRLRLSASASENAELAFPTATAPDSTTEVVITFHVTAIRQVDWRQEEKEEE

SEQ ID NO: 14 - DNA, 2562 bp, Adiantum sp.
  source 1..2562: mol_type = unassigned DNA; note = Adiantum peruvianum
atggattacagcacgctttacagggacctgaaccagataagcatcggtgtggaccgggtagagttctcagaggtgatggtgatccacaggatgtatgtaaggttgtctgatctgaatgtgggggagctccccggagccgggagagtgaagcgggtgtacgtgtttgcggatgtggtggagcttgcaccgcgtgcgacgctgcgggatcagatgcatatgccaggatcggtgacagtgatcgtattgtgtcgtcttcttcaatttccaatcgatgggtcgcaagctacaactctccggctgcctttcatgcagttgcatgccagagtcatagagcaaaatgtaaagtcggagataacagcaacagatggcatgaattggggaatctacatatacggggagaaagtagagaggagcccgctccttcctagcaatgcaatccttgcagtttgggcagatcgctgtactataacctcagcccgtcacaatcatgttaacgcacctgggagaataatatcgactttcacacttgggtcgggagtaacgggtataacctctatgcacggggaacccagtttggacccttggaatggtgtttctctcgactcagcttcccctacggcatttagtgctttacctcgccaaagtaggaatatatccttcacaagtattccagtagaggtggtgactgatcctagcatcttgctgggcatgcagaccaccgtgctaattgcggagctagtcaaggtatgtcgcccaccatcacccgacatgatgagtgctgtagcggagcacgcgctttggctcaatgatgtcttacttcaagttgtccagaaagaatcgcagatgcaagggactgcgccctacaacgagtgccttgcacttttgggtcgcattgaatgtgtgatgaaaatcgggagatttgtctcagtagtgcctcagctgcaatacagaatgtatggtaacctcatcaaacaaatggcccaagtagcacaaaactacgaccaagaattcaagcaattcaagttattcatcatccaaaaccaaatctttggcagctatttgcttcagcagaacaaggcatttgctgacagggagctgcagatggagagctttcattcagcggtcatttctcaaagaaggcaggagttgaatactgccatcgcaaagatggagcgaatgagcttgcaaatggaggaagagaatagagcaatggagcaagctcaaaaggaaatggaagaaggattgagggagttccagaataggcaagttgcaagggccgtatttgccgttcttaaagccgtagctatgattgcgcttgcattcgtcacggctggtgcgacggctcctggagctgcggcgtccgcggggcaagctgtgagcatagcaggtcaggccgcacaagctctgcgaagggtggtggaaattctagaggggctggaggctgtgatggaggttgtggctgctgtgaaggaccttgtggattcattggaacaggtaggtcacattgtgggggcaccggagatgccggacatgccctcggaggcggactggtccatttttgtgaatgagattgaggccgtggcagaggggatgccaacggaagtctcggaggttccggcatggaaggccaagtgcaagaatatggctgcactgggtagggagatgagcatcacggcagtacagatttctgagctccagtatgagatctgggtgcaaggcttgatgcgggatatagctcgaagccatgcagacaggttggctgcgattcaacctgtggaccttaccaaccatttggagatggccacacacatggatatgcggactacaagtatgctgatagggctcctcaatatgctgcgcatccagaatgcggcactcatgtacgagtaccttctaacacccacggagctcacagtatggccactgggtatggataccgtggccaacttgctcattgcgcaggagaatgctgcactggtgggattaattcagctagggccctcgtcgaattttacgagcagacatgtggtgaaaggcatacctgtgagcttgctgctcgatggtgaggattgggagttcgagatccctgtgcaagctggcatgtccagcttccctttcaactggactcgggtcaggattcggcacctggagatgcaatttgcgcaggaggcgagtggtggtgacgagattatccaccagccttccacccggtcggggattgtttacatcctcctgcagggctccactatcttccatgaccgcagaagagatgaggtgatgacctttcaggcagcggacccgctcaacttccaatatgcgtaccgcctcgacactggcgaagccactctaacgaatgagccctcggaagagtttgcgaacacgttcatgcagatgacacccttcactcgctggaggcttcgtctctctgcgtccgcctcagagaatgcagaattagcgtttccaacagctacagctcccgactccactaccgaggttgtcatcacgttccatgttacggcaatcagacaagttgactggcggcaggaggagaaagaggaggag

SEQ ID NO: 15 - protein, 852 aa, Lygodium flexuosum
MASVLDYSTLYRDLNQISMAVDQVEFSEVMVIHRMYVNLADLDVAELVGAETVKRVYVFADVVELAPGKRTQLPGSVTVIILCRLLQFPTGGSRAATLQLPFMKVHATLIERFRSEIAAADGMNWGTYIHGEEVQVSPLYPNNSILGVWADRSIITSAFHNVFDEPGRVISSTSITRAQSAPNNTTMSAEPGWLSGNRFLLYTVSRSAFSVLPSQSTNVSFTSIPVEVVTDPNILLGMQTTVHIAELVKAGHPSPDIVSAVAEHAIWLSKVLLQVVQNESHLQGTESYNECLALLGRVQSVIKMGRFGLVVPQLQYRMYGSLIKQMAQVAQNYDQDFKRFRLFILQNQILGSYLLEQNKAFADRELQMESFHSAVISQRKGELDTAFAKMDRLSLQMEEENGAMEQAQKEMDEGLRQFQNRQVARALFAVLRAVAQIGLAFVTAGATAPGAVASAGQAVSIAGQAAQGLRRVVEILEQLEAVMEVVAAVKDLVNSLEQVGQLVQAPVMPDMPSEADWSIFVNEVEAVAEGMPTEVSEVPAWKAKCKNVAALGREMSITAVQISELQYDIWVQGMMRDIAQSQADRLAAIQPADLTNFLEMATQMDMRTTRMLIGLLNMLRIQNAALMYEYLLTPTELTAWPLGMDTVGNLLIAQENAALLGLTQLGPSSDFTSRHVVKGIPVSLLLDGEDWEFEIPVQGGMSSFPSSWTRVRIRHLEMHFVQESMNGGGEIIHQPATQTGTVYILLQGSTIFHDRRRDEVMTFQAAAPLNYQYAYRLDTGETTLTNQPSEHFANTFMQMTPFTRWRLRLSASAPENAGLAFPTATALDSTTQIVITFHVTAIRQIDWRHEEE

SEQ ID NO: 16 - DNA, 2556 bp, Lygodium flexuosum
  source 1..2556: mol_type = unassigned DNA
atggccagtgtactggattacagcacgctttacagggatctgaaccagataagcatggctgtggatcaggtagagttctcagaggtgatggtgatccacaggatgtatgtgaatttagctgacctggatgtggcggagctcgtgggagctgagacagtgaagcgggtgtatgtgtttgcggatgtggtggagcttgcaccggggaaacggacgcaattgccaggatcggtgacggtgatcatattgtgtcgtcttcttcaatttccaactggtgggtcgcgagcagcaactctccagctgcctttcatgaaggtccatgctacactcatagagcgatttaggtcagagatagcagcagcagatgggatgaactggggaacgtacatacacggggaggaagtacaggtcagcccgctgtatcctaacaattcaatacttggagtttgggcagatcgctctattataacctcagcctttcacaatgtgttcgacgaacctgggagagtaatttccagtactagtattacaagggcacagtcagcacccaacaacacgactatgtcagcagaacccggctggctctctggcaatcgttttctactttacacggtttcccggtcggcattcagtgttttacctagccaaagtacgaatgtatccttcacaagtattccggtagaggtggtgactgatccgaacatcttgctgggcatgcagacaacagtgcacattgcggagctagtcaaggcaggtcacccgtcacccgacattgtgagcgcggtagcggagcacgcgatttggctcagcaaagtcttgctccaagttgtgcagaacgaatctcacttgcaagggaccgagtcctacaacgagtgcctggcacttttgggccgtgttcaatctgtgatcaagatggggagatttggcttagtagtgccccagctgcaatacagaatgtacggtagcctcatcaaacaaatggcccaagtagcacagaactacgaccaagatttcaagcgattccggttattcattcttcaaaatcaaatccttggcagctatttgctggagcagaacaaggcatttgctgacagggagctgcagatggagagcttccattcagccgtgatttctcaaagaaaaggcgagctggacactgccttcgcaaagatggaccgactgagcttgcaaatggaggaagagaatggcgcaatggagcaagcccaaaaggaaatggacgaaggattaaggcagttccagaataggcaagttgcaagggccctctttgccgttcttagagctgtagctcagattgggcttgcattcgtcacggctggtgcaacggctcctggagctgtggcgtccgcggggcaagccgtgagcatagcaggtcaggccgcgcaaggtctgcgaagggtggtggaaatcctagagcagctggaagctgtgatggaggttgtggctgctgtgaaggaccttgtgaattcattggaacaggtaggtcagttggtgcaggcaccggtgatgccggacatgccctcggaagcggactggtccatttttgtgaatgaggtcgaggccgtggcagaggggatgccgacggaagtctcggaggttccagcgtggaaggccaagtgcaagaatgtggctgcactgggtcgggagatgagcatcaccgcagtacaaatttctgagctccagtatgacatctgggtgcaaggcatgatgcgggatattgctcaaagccaggcagacaggctggcggcgattcaacccgcggaccttaccaactttttggagatggcaacacagatggatatgcggactacaaggatgctgatagggctcctcaacatgctccgcatccagaatgcggcactcatgtacgagtaccttcttacgcccacggagctcacagcatggccgctgggtatggataccgtgggcaacttgctcattgcgcaggagaatgctgcactattaggattaactcagctaggaccctcatccgatttcacgagcaggcatgtggtgaaaggcatacctgtgagcttgctactcgatggtgaggattgggagttcgagatccctgtgcaaggtggcatgtccagcttcccttcaagctggactcgcgtccggattcggcacttggagatgcactttgtgcaagagtcgatgaacggtggcggcgagattattcaccagcctgccacccagactgggaccgtttacatcctcctgcagggctccactatcttccatgaccgcagaagagacgaggtgatgacctttcaggcagcggctccgctcaactaccagtacgcgtaccgcctcgacactggtgaaaccactcttacgaaccagccctcggaacactttgccaacacgttcatgcagatgacacccttcactcgctggaggcttcgtctctctgcgtccgccccagagaatgcaggattagcctttcccacagctacagctctcgactccactacccagattgtcatcactttccatgttacggccattagacaaattgactggcggcacgaggaggag

SEQ ID NO: 17 - protein, 852 aa, Adiantum sp.
  source 1..852: note = Adiantum peruvianum
MDYSTLYRDLNQISMPLDRVEFSEVMVIHRMYLRLSDLNVGELPGAERVKRLYVFADVVELATFAYPQLLHTRMPGSVTVIILCRLLQFPTDGSFAAWLELPFMELHTLIEQYRSEIKAADDAKWGTYVHAEEVQLSPLFNGWPYLVVEAQRCIITAAMHNTFNRPGWVRSVTQFTTDQSGRVDTTLLARTEFGHIYLPLETDSPTAFSVSHRQSTNLPVEYTGIPVEVVTDPNILMGMQTSVHIAELVKACYPSPELVSAVGVHVNWLNEVLLRVVQKESQLQGTEAYNECLALLGRIQCVMKMGPFVSVVPQLQYRMYGSLIRQMAQVAQNYDQDFRQLKLFIAQNQILGSYLLQQNKAFADREVQMESFHSAVISQRRQELDDALAKMDRLSLQMEEEDRAMEQARKEMEEGLKQFQNEQVARAVFAVLKSVAMIALAFVTAGATAPGAAASAAQAVNIAGQAAQALRRVVEILEGLEAVMEVVAAIKHLVDALDQVSQIVDAPPMPDMPSEADWSIFVNEIEAVAEGMPTEVSEVPAWKAKCKNVAALGREMCITAEQISQLQYDIWVQGLLRDIAQTHADRLAAIQPANLTNYLEMATQMDMRTTRILIGLLNIMRIQNAALMYEYLLTPTQLTAWPLRMDTVANLLITQESAALSGLAQLGPPSDFTSRHVVKGIPVSLLLDGGDWEFEIPVQGGMSSFPSSWTRVRIRHLEMHFVQEASGGGEIIHQPATQTGTVYILLQGSTVFHDRRREEVMTFQAAVPLNYHYAYRLDTGEATLTNEPSEQFANTFMQMTPFTHWRLRLSASAAENEGLAFPTATAPDSTTEIAITFHVMAIRQIDWRQEEE

SEQ ID NO: 18 - DNA, 2556 bp, Adiantum sp.
  source 1..2556: mol_type = unassigned DNA; note = Adiantum peruvianum
atggattacagcactctttacagggatctgaaccagataagcatgcccctggatcgggtagagttctcagaggtgatggtaatccacaggatgtacttgaggttatctgatctgaatgtgggggagctccccggagccgagagggtgaagcggttgtatgtgtttgcagacgtggtggagctcgcgacatttgcgtatccacagttgcttcatacgcggatgccaggatcggtgacggtgatcattctgtgtcgtcttcttcagtttccaactgatgggtcgttcgctgcttggctcgagctgccgttcatggagttgcacacactcatagaacaatacaggtcagagataaaagcagcagatgacgcgaaatggggaacgtatgtacacgcggaggaagtacagctcagcccgctgtttaatgggtggccttatctggttgttgaggcacagcgctgtattataaccgcggccatgcacaatacatttaaccgccctgggtgggttcgctccgttactcaatttacaactgatcagtccggtcgggtagataccacactgctcgcacgaacagaattcggccatatttatctaccactcgagacagattccccaacggcattcagtgtttcacaccgccaaagtacgaatttgcccgtagagtacaccggtattccagtagaggtggtgaccgatcctaacatcttgatgggcatgcaaaccagcgtgcacattgcggagctagtgaaggcatgttacccgtcaccagaattagtgagcgctgtaggggtgcacgtgaattggctcaacgaagtcttgctccgagttgtccagaaggaatctcagttgcaagggaccgaggcctacaacgagtgccttgcgcttttgggtcgcattcaatgtgtcatgaagatggggccgtttgtctcggtagtgccgcagctgcaatacagaatgtatggtagcctcatcagacaaatggcccaggtagcacagaactacgaccaagatttcaggcagctcaagttattcattgcccaaaaccaaatccttggcagctatttgctgcagcagaacaaggcatttgctgacagagaggtgcagatggagagctttcattcagcggtcatttctcaaagaaggcaggagttggacgacgccctcgctaagatggaccgactgagcttgcagatggaggaagaggacagagcaatggagcaagcccgaaaagaaatggaagaaggattgaagcagttccagaatgagcaagttgcaagggctgtgttcgctgttcttaaatctgtagctatgattgcgctcgcattcgtcacggctggtgcaacggctcctggggctgcagcatccgcagcgcaagctgtgaacatagccggtcaagcggcacaagctctgcgaagggtggtggaaattctagaggggctcgaggctgtgatggaggttgtggctgctataaagcaccttgtggatgctctggaccaggtaagtcagattgtggatgcaccacctatgccagacatgccctcggaggcagactggagtatttttgtgaatgagattgaagccgtggcagaggggatgccgacggaagtctcggaggttccggcgtggaaggccaagtgcaagaatgtggctgcactgggtagggagatgtgcatcacggcagaacagatttcccagctccagtatgacatctgggtgcaaggcttgttgcgggatatagctcaaacccacgcagaccggctggcagcgattcaacctgctaatcttaccaactatttggagatggcaacacagatggatatgcggactacgaggatattgatagggctcctcaacataatgcgcatccagaatgcggcacttatgtatgagtaccttctaacgcccacgcagctcactgcatggccgctgagaatggatactgtggccaacttgctcatcacgcaggagagtgctgcactgtcaggattagctcagttagggcccccatcggacttcacgagcaggcatgtggtgaaaggcatacctgtgagcttgcttctagacggtggggattgggaatttgagattcctgtgcaaggtggcatgtccagtttcccttccagctggactcgagtgcggattcggcacctggagatgcactttgtgcaggaggcgagcggtggcggcgagattatccaccagcctgccacccagacggggaccgtttacatcctcctgcagggctccactgtcttccatgatcgcagaagggaggaggtgatgacctttcaggcagcggttccgctcaactaccattacgcgtaccgcctcgacactggagaagccactcttacgaacgagccctcggaacagtttgccaacacattcatgcagatgacaccgttcactcactggaggctacgtctgtctgcgtccgcagcggagaatgaaggattagcctttcccacagctacagctcccgactccaccactgagattgccatcactttccatgttatggccattagacaaatcgactggcggcaagaggaggag

SEQ ID NO: 19 - protein, 782 aa, Adiantum sp.
  source 1..782: note = Adiantum peruvianum
MDYSTLYRDLNQISIGVDRVEFSEVMVIHRMYVRLSDLNVGELPGAGRVKRVYVFADVVELAPRATLRDQMHMPGSVTVIVLCRLLQFPIDGSQATTLRLPFMQLHARVIEQNVKSEITATDGMNWGIYIYGEKVERSPLLPSNAILAVWADRCTITSARHNHVNAPGRIISTFTLGSGVTGITSMHGEPSLDPWNGVSLDSASPTAFSALPRQSRNISFTSIPVEVVTDPSILLGMQTTVLIAELVKVCRPPSPDMMSAVAEHALWLNDVLLQVVQKESQMQGTAPYNECLALLGRIECVMKIGRFVSVVPQLQYRMYGNLIKQMAQVAQNYDQEFKQFKLFIIQNQIFGSYLLQQNKAFADRELQMESFHSAVISQRRQELNTAIAKMERMSLQMEEENRAMEQAQKEMEEGLREFQNRQVARAVFAVLKAVAMIALAFVTAGATAPGAAASAGQAVSIAGQAAQALRRVVEILEGLEAVMEVVAAVKDLVDSLEQVGHIVGAPEMPDMPSEADWSIFVNEIEAVAEGMPTEVSEVPAWKAKCKNMAALGREMSITAVQISELQYEIWVQGLMRDIARSHADRLAAIQPVDLTNHLEMATHMDMRTTSMLIGLLNMLRIQNAALMYEYLLTPTELTVWPLGMDTVANLLIAQENAALVGLIQLGPSSNFTSRHVVKGIPVSLLLDGEDWEFEIPVQAGMSSFPFNWTRVRIRHLEMQFAQEASGGDEIIHQPSTRSGIVYILLQGSTIFHDRRRDEVMTFQAADPLNFQMRTASTLAKPL

SEQ ID NO: 20 - DNA, 2346 bp, Adiantum sp.
  source 1..2346: mol_type = unassigned DNA; note = Adiantum peruvianum
atggattacagcacgctttacagggacctgaaccagataagcatcggtgtggaccgggtagagttctcagaggtgatggtgatccacaggatgtatgtaaggttgtctgatctgaatgtgggggagctccccggagccgggagagtgaagcgggtgtacgtgtttgcggatgtggtggagcttgcaccgcgtgcgacgctgcgggatcagatgcatatgccaggatcggtgacagtgatcgtattgtgtcgtcttcttcaatttccaatcgatgggtcgcaagctacaactctccggctgcctttcatgcagttgcatgccagagtcatagagcaaaatgtaaagtcggagataacagcaacagatggcatgaattggggaatctacatatacggggagaaagtagagaggagcccgctccttcctagcaatgcaatccttgcagtttgggcagatcgctgtactataacctcagcccgtcacaatcatgttaacgcacctgggagaataatatcgactttcacacttgggtcgggagtaacgggtataacctctatgcacggggaacccagtttggacccttggaatggtgtttctctcgactcagcttcccctacggcatttagtgctttacctcgccaaagtaggaatatatccttcacaagtattccagtagaggtggtgactgatcctagcatcttgctgggcatgcagaccaccgtgctaattgcggagctagtcaaggtatgtcgcccaccatcacccgacatgatgagtgctgtagcggagcacgcgctttggctcaatgatgtcttacttcaagttgtccagaaagaatcgcagatgcaagggactgcgccctacaacgagtgccttgcacttttgggtcgcattgaatgtgtgatgaaaatcgggagatttgtctcagtagtgcctcagctgcaatacagaatgtatggtaacctcatcaaacaaatggcccaagtagcacaaaactacgaccaagaattcaagcaattcaagttattcatcatccaaaaccaaatctttggcagctatttgcttcagcagaacaaggcatttgctgacagggagctgcagatggagagctttcattcagcggtcatttctcaaagaaggcaggagttgaatactgccatcgcaaagatggagcgaatgagcttgcaaatggaggaagagaatagagcaatggagcaagctcaaaaggaaatggaagaaggattgagggagttccagaataggcaagttgcaagggccgtatttgccgttcttaaagccgtagctatgattgcgcttgcattcgtcacggctggtgcgacggctcctggagctgcggcgtccgcggggcaagctgtgagcatagcaggtcaggccgcacaagctctgcgaagggtggtggaaattctagaggggctggaggctgtgatggaggttgtggctgctgtgaaggaccttgtggattcattggaacaggtaggtcacattgtgggggcaccggagatgccggacatgccctcggaggcggactggtccatttttgtgaatgagattgaggccgtggcagaggggatgccaacggaagtctcggaggttccggcatggaaggccaagtgcaagaatatggctgcactgggtagggagatgagcatcacggcagtacagatttctgagctccagtatgagatctgggtgcaaggcttgatgcgggatatagctcgaagccatgcagacaggttggctgcgattcaacctgtggaccttaccaaccatttggagatggccacacacatggatatgcggactacaagtatgctgatagggctcctcaatatgctgcgcatccagaatgcggcactcatgtacgagtaccttctaacacccacggagctcacagtatggccactgggtatggataccgtggccaacttgctcattgcgcaggagaatgctgcactggtgggattaattcagctagggccctcgtcgaattttacgagcagacatgtggtgaaaggcatacctgtgagcttgctgctcgatggtgaggattgggagttcgagatccctgtgcaagctggcatgtccagcttccctttcaactggactcgggtcaggattcggcacctggagatgcaatttgcgcaggaggcgagtggtggtgacgagattatccaccagccttccacccggtcggggattgtttacatcctcctgcagggctccactatcttccatgaccgcagaagagatgaggtgatgacctttcaggcagcggacccgctcaacttccaaatgcgtaccgcctcgacactggcgaagccactc

SEQ ID NO: 21 - protein, 623 aa, Adiantum trapeziforme
MDYSTLYRDLNQISIGVDRVEFSPDMMSAVAEHALWLNDVLLQVVQKESQMQGTAPYNECLALLGRIECVMKIGRFVSVVPQLQYRMYGNLIKQMAQVAQNYDQEFKQFKLFIIQNQIFGSYLLQQNKAFADRELQMESFHSAVISQRRQELNTAIAKMERMSLQMEEENRAMEQAQKEMEEGLREFQNRQVARAVFAVLKAVAMIALAFVTAGATAPGAAASAGQAVSIAGQAAQALRRVVEILEGLEAVMEVVAAVKDLVDSLEQVGHIVGAPEMPDMPSEADWSIFVNEIEAVAEGMPTEVSEVPAWKAKCKNMAALGREMSITAVQISELQYEIWVQGLMRDIARSHADRLAAIQPVDLTNHLEMATHMDMRTTSMLIGLLNMLRIQNAALMYEYLLTPTELTVWPLGMDTVANLLIAQENAALVGLIQLGPSSNFTSRHVVKGIPVSLLLDGEDWEFEIPVQAGMSSFPFNWTRVRIRHLEMQFAQEASGGDEIIHQPSTRSGIVYILLQGSTIFHDRRRDEVMTFQAADPLNFQYAYRLDTGEATLTNEPSEEFANTFMQMTPFTRWRLRLSASASENAELAFPTATAPDSTTEVVITFHVTAIRQVDWRQEEKEEE

SEQ ID NO: 22 - DNA, 1869 bp, Adiantum trapeziforme
  source 1..1869: mol_type = unassigned DNA
atggattacagcacgctttacagggacctgaaccagataagcatcggtgtggaccgggtagagttctcacccgacatgatgagtgctgtagcggagcacgcgctttggctcaatgatgtcttacttcaagttgtccagaaagaatcgcagatgcaagggactgcgccctacaacgagtgccttgcacttttgggtcgcattgaatgtgtgatgaaaatcgggagatttgtctcagtagtgcctcagctgcaatacagaatgtatggtaacctcatcaaacaaatggcccaagtagcacaaaactacgaccaagaattcaagcaattcaagttattcatcatccaaaaccaaatctttggcagctatttgcttcagcagaacaaggcatttgctgacagggagctgcagatggagagctttcattcagcggtcatttctcaaagaaggcaggagttgaatactgccatcgcaaagatggagcgaatgagcttgcaaatggaggaagagaatagagcaatggagcaagctcaaaaggaaatggaagaaggattgagggagttccagaataggcaagttgcaagggccgtatttgccgttcttaaagccgtagctatgattgcgcttgcattcgtcacggctggtgcgacggctcctggagctgcggcgtccgcggggcaagctgtgagcatagcaggtcaggccgcacaagctctgcgaagggtggtggaaattctagaggggctggaggctgtgatggaggttgtggctgctgtgaaggaccttgtggattcattggaacaggtaggtcacattgtgggggcaccggagatgccggacatgccctcggaggcggactggtccatttttgtgaatgagattgaggccgtggcagaggggatgccaacggaagtctcggaggttccggcatggaaggccaagtgcaagaatatggctgcactgggtagagagatgagcatcacggcagtacagatttctgagctccagtatgagatctgggtgcaaggcttgatgcgggatatagctcgaagccatgcagacaggttggctgcgattcaacctgtggaccttaccaaccatttggagatggccacacacatggatatgcggactacaagtatgctgatagggctcctcaatatgctgcgcatccagaatgcggcactcatgtacgagtaccttctaacacccacggagctcacagtatggccactgggtatggataccgtggccaacttgctcattgcgcaggagaatgctgcactggtgggattaattcagctagggccctcgtcgaattttacgagcagacatgtggtgaaaggcatacctgtgagcttgctgctcgatggtgaggattgggagttcgagatccctgtgcaagctggcatgtccagcttccctttcaactggactcgggtcaggattcggcacctggagatgcaatttgcgcaggaggcgagtggtggtgacgagattatccaccagccttccacccggtcggggattgtttacatcctcctgcagggctccactatcttccatgaccgcagaagagatgaggtgatgacctttcaggcagcggacccgctcaacttccaatatgcgtaccgcctcgacactggcgaagccactctaacgaatgagccctcggaagagtttgcgaacacgttcatgcagatgacacccttcactcgctggaggcttcgtctctctgcgtccgcctcagagaatgcagaattagcgtttccaacagctacagctcccgactccactaccgaggttgtcatcacgttccatgttacggcaatcagacaagttgactggcggcaggaggagaaagaggaggag

SEQ ID NO: 23 - protein, 691 aa, Adiantum trapeziforme
MDYSTLYRDLNQISIGVDRVEFSEVMVIHRMYVRLSDLNVGELPGAGRVKRVYVFADVVELAPRATLRDQMHMPGSVTVIVLCRLLQFPIDGSQATTLRLPFMQLHARVIEQNVKSEITATDGMNWGIYIYGEKVERSPLLPSNAILAVWADRCTITSARHNHVNAPGRIISTFTLGSGVTGITSMHGEPSLDPWNGVSLDSASPTAFSALPRQSRNISFTSIPVEVVTDPSILLGMQTTVLIAELVKVCRPPSPDMMSAVAEHALWLNDVLLQVVQKESQMQGTAPYNECLALLGRIECVMKIGRFVSVVPQLQYRMYGNLIKQMAQVAQNYDQEFKQFKLFIIQNQIFGSYLLQQNKAFADRELQMESFHSAVISQRRQELNTAIAKMERMSLQMEEENRAMEQAQKEMEEGLREFQNRQVARAVFAVLKAVAMIALAFVTAGATAPGAAASAGQAVSIALMYEYLLTPTELTVWPLGMDTVANLLIAQENAALVGLIQLGPSSNFTSRHVVKGIPVSLLLDGEDWEFEIPVQAGMSSFPFNWTRVRIRHLEMQFAQEASGGDEIIHQPSTRSGIVYILLQGSTIFHDRRRDEVMTFQAADPLNFQYAYRLDTGEATLTNEPSEEFANTFMQMTPFTRWRLRLSASASENAELAFPTATAPDSTTEVVITFHVTAIRQVDWRQEEKEEE

SEQ ID NO: 24 - DNA, 2073 bp, Adiantum trapeziforme
  source 1..2073: mol_type = unassigned DNA
atggattacagcacgctttacagggacctgaaccagataagcatcggtgtggaccgggtagagttctcagaggtgatggtgatccacaggatgtatgtaaggttgtctgatctgaatgtgggggagctccccggagccgggagagtgaagcgggtgtacgtgtttgcggatgtggtggagcttgcaccgcgtgcgacgctgcgggatcagatgcatatgccaggatcggtgacagtgatcgtattgtgtcgtcttcttcaatttccaatcgatgggtcgcaagctacaactctccggctgcctttcatgcagttgcatgccagagtcatagagcaaaatgtaaagtcggagataacagcaacagatggcatgaattggggaatctacatatacggggagaaagtagagaggagcccgctccttcctagcaatgcaatccttgcagtttgggcagatcgctgtactataacctcagcccgtcacaatcatgttaacgcacctgggagaataatatcgactttcacacttgggtcgggagtaacgggtataacctctatgcacggggaacccagtttggacccttggaatggtgtttctctcgactcagcttcccctacggcatttagtgctttacctcgccaaagtaggaatatatccttcacaagtattccagtagaggtggtgactgatcctagcatcttgctgggcatgcagaccaccgtgctaattgcggagctagtcaaggtatgtcgcccaccatcacccgacatgatgagtgctgtagcggagcacgcgctttggctcaatgatgtcttacttcaagttgtccagaaagaatcgcagatgcaagggactgcgccctacaacgagtgccttgcacttttgggtcgcattgaatgtgtgatgaaaatcgggagatttgtctcagtagtgcctcagctgcaatacagaatgtatggtaacctcatcaaacaaatggcccaagtagcacaaaactacgaccaagaattcaagcaattcaagttattcatcatccaaaaccaaatctttggcagctatttgcttcagcagaacaaggcatttgctgacagggagctgcagatggagagctttcattcagcggtcatttctcaaagaaggcaggagttgaatactgccatcgcaaagatggagcgaatgagcttgcaaatggaggaagagaatagagcaatggagcaagctcaaaaggaaatggaagaaggattgagggagttccagaataggcaagttgcaagggccgtatttgccgttcttaaagccgtagctatgattgcgcttgcattcgtcacggctggtgcgacggctcctggagctgcggcgtccgcggggcaagctgtgagcatagcactcatgtacgagtaccttctaacacccacggagctcacagtatggccactgggtatggataccgtggccaacttgctcattgcgcaggagaatgctgcactggtgggattaattcagctagggccctcgtcgaattttacgagcagacatgtggtgaaaggcatacctgtgagcttgctgctcgatggtgaggattgggagttcgagatccctgtgcaagctggcatgtccagcttccctttcaactggactcgggtcaggattcggcacctggagatgcaatttgcgcaggaggcgagtggtggtgacgagattatccaccagccttccacccggtcggggattgtttacatcctcctgcagggctccactatcttccatgaccgcagaagagatgaggtgatgacctttcaggcagcggacccgctcaacttccaatatgcgtaccgcctcgacactggcgaagccactctaacgaatgagccctcggaagagtttgcgaacacgttcatgcagatgacacccttcactcgctggaggcttcgtctctctgcgtccgcctcagagaatgcagaattagcgtttccaacagctacagctcccgactccactaccgaggttgtcatcacgttccatgttacggcaatcagacaagttgactggcggcaggaggagaaagaggaggag

SEQ ID NO: 25 - protein, 813 aa, Pteridium aquilinum
MGNSIAAAEARNYEEIYKDANHIGAKSLITPVCSEVMTVCRMYVRLDDLDVKVLERAEEVKVLYVVADVVEVRGDAVQLPPSVQLILSCRVLFFSSGNGWPQVALLQGPLVQYNGNYSPVTGNWSATPLLEQDTYRFFLHGQQLLILSGTSGRASGDNILSEDEKKLQLQSSTAPILPPRWVMEDPHILSGLEASVITSELIVGHMTHAVDLVAEVKLHVEWLLLLLRHVLNETMTNAEANHLLRSLFFRVQSLVRMATAAQNNILVVPRLQHHAYSEYINRLAELARTYDSDFKALTLFIQQNEILGSYLLEQNKAFAEKERDMEVVYTTLNDIKMSELIQALGQLERLGEEMGKMSEEMEQAREDMEKGLKIYRNKQVARAAFSLLNAIAQIGLAIFTAGATTGLAASAVANAGQAITQATEAVQQLRRIFETIEKILLLAEVLVAMRDLLAAINDGGELGTLPEWPEMPTTTEWEIFENEVEAVAAGMPEEVSETLVWKAKCKNVAAIGREMVTQAMLVSQLEYDIKVHSLLQEVAQNQAARLEAIQPTDLIDYQEMAAQLDMRTSRILLSLLQVLALQNGALTYSYLMPRTSLSARSVSATMSAVWGLLLHQGQATLVALGELGSPSTRSVEYVVKGIPVGLLLDGEDWDFTIPVADTLHFPSTWSRVRISHVEMKFVKTGGTAAGRDEELVHQPTTDTGKVYIVLRSELFFQDRRKGQYFKYEATVPAIYHYAYNLATSETTEDNRPDEEFARVFMRMTPFTRWKLRVSTSARENQGLAFPTAITPDATTQIVIRFYLSAIRDFDWNR

SEQ ID NO: 26 - protein, 877 aa, synthetic construct
  REGION 1..877: note = PtIP-83Aa - His tagged
MALVDYGKLFEDLNQISMGVLDRVEFSEVMVIHRMYVRLADLNVGQLEGAEKVKRLYVFADVVELPVVEWRWPPQIPGSVTVIILCRLLQWPTDGRQSDTELHLTFMKLHAIQREENRWEITAADGMNWGVYIHAEEVQVGVLTMSWSSVLRVSALRSVITSGFRAVSVFEVPGSVRSTLGATLRPDHALYSTTMQATPNASHISAFNLRIVSPSAYRVCPLQNDTDTYLGIPADVAAVLPVDVVTDPNILLGMQTTVHIAELVKACHPSPDVVSAVGEHLNWLNKLLLPLKESTQLQGSESYKECLALLGRVHAAMKMVRIGLVVPQLQYRMYGSLINQMAQVAQNYDREFKQFKLFIIQNQILGSYLLQQNRAFAERELQMESFHAAVISQRREELDNTFAKMDRLSGQMEAESSAMEQAKKEMDEGLRQFQNRQVANALFAVLSAVAQIGLAFLTAGATAPGAVASAGQAVSIAGQAAQGLRRVVEILEQLEAVMEVVAAVKDLVDSLEQVGQIVDAPVMPELPSEADWSIFVNEVEAVAEGMPTEVSEVPVWRAKCKNVAALGREMSITAVQMSELQYDIWVQGMMRDMARSQADRLAAIQPADLTNYLEMATQMDMRTTRMLLGLLNILRIQNAALRYEYLLMPTELTTWPLGMDTVGDLLIAQENAALIGLMQLGPSSDFTSRHVVKDIPVNLLLDGEDWEFEIPVQAGMSSFPSSWSRVRIRHLEMHFVKEASGIGGEIIHQPTTQTGTVYILLQGSTIFHDRRRDQVLPFQAAAPLNYHYAYRLDTGDSTLTNEPSEQFANKFMQMTPFTRWRLRLSASAKENAGLAFPTATALDSTTQIVITFHVTAIRQIDWRHDEEHHHHHHHHHH

SEQ ID NO: 27 - DNA, 2631 bp, synthetic construct
  misc_feature 1..2631: note = PtIP-83Aa - His tagged
  source 1..2631: mol_type = other DNA
atggctctcgtggattacggcaagcttttcgaggatctgaaccagataagcatgggtgtactggatcgggtagagttttcagaggtgatggtgatccacaggatgtatgtgaggctagctgatctgaatgtggggcagctcgagggagccgagaaagtgaagcggttgtatgtgtttgcggacgtggtggagctaccagtcgtggaatggcggtggccgccgcaaataccaggatcggtgacggtgatcatattgtgtcgtcttcttcaatggccaactgatgggaggcagtcggacaccgagctccacctgacattcatgaagttgcatgccatacaacgagaggaaaatcggtgggagataaccgcagcagatggcatgaactggggagtttacatacacgcagaggaagtacaggttggcgtgctgacaatgtcatggtcttcggtacttagagtttcggcacttcgctctgttataacctccggctttcgcgccgttagtgtgtttgaggtaccgggaagtgtaaggtccacccttggagctactttaaggcccgatcacgccttatatagtacaactatgcaagccacacccaacgcatcgcatattagtgcttttaaccttcgcatagtttccccgtcggcatatcgtgtttgtcctctccaaaatgacacagatacctacttaggtattccagcagacgtggcggcagttcttccagtagacgtggtgactgatcctaacatcttgctgggcatgcagacaacggtacacattgcggagctagtcaaggcatgtcatccgtcacccgatgttgtgagcgctgtaggggagcacctgaactggctcaacaaactcttactcccacttaaggaatcgactcagttgcaaggaagcgagtcgtacaaggagtgccttgcactcttgggtcgtgttcacgctgcgatgaagatggtgagaattggcttagtagtgccccagctgcaatacagaatgtacggtagcctcatcaaccaaatggcccaagtagcacaaaactacgaccgagaattcaagcaattcaaattattcatcatccaaaatcaaatccttggcagctatttgctgcagcagaacagggcatttgctgagagggagctgcagatggagagctttcatgctgctgtcatttctcaaagaagggaggagttggacaatacattcgcaaagatggaccgattgagcgggcaaatggaggcagagagtagtgcaatggagcaagccaaaaaggaaatggacgaaggattgaggcagttccagaataggcaagttgcgaacgccctctttgccgttcttagcgctgtagctcagattgggcttgcattccttacggctggtgcaacggctcctggagctgtggcgtcggcggggcaagctgtgagcatagcaggtcaggcggcgcaaggtctgcgaagggtggtggaaattctagagcagctggaggctgtgatggaggttgtggctgctgtgaaggacctcgtggattcattggaacaggtaggtcagattgtggacgcaccggtgatgccggaattgccctcagaggcggactggtccatttttgtgaacgaggtggaggccgtggcagagggcatgccaacggaagtctcggaggttccggtgtggagggccaagtgcaagaatgtggctgcactgggtcgggagatgagcatcacggcagtacagatgtcggagctgcagtatgacatctgggtgcaaggcatgatgcgggatatggctcgaagccaggcagacaggctggccgcaattcaacccgcggaccttaccaactatttggagatggctacccagatggatatgcggactacgaggatgctgctggggctcctcaacatattgcgcatccagaatgcggcgctcaggtacgagtatcttctaatgcccacggagctcacaacatggccactgggtatggataccgtgggtgacttgctcatcgcgcaggagaatgctgcactgataggattaatgcagctagggccctcatctgatttcacgagcaggcatgtggtgaaagacatacctgtgaacttgctgctcgatggcgaggattgggagtttgagattcctgtgcaagctggcatgtccagcttcccttccagctggtctcgcgtccgtattcggcacctggagatgcactttgtgaaggaggccagcggtattggtggtgagattatccaccagcctaccacccagactgggaccgtttacatccttctgcagggttccactatcttccatgaccgcagaagagaccaggtgttgccttttcaggccgctgctccgctcaactaccattacgcgtaccgcctcgacaccggcgactccactctcacaaacgaaccctctgaacagtttgccaacaagttcatgcagatgacacccttcacccgttggaggcttcgtctgtctgcgtccgcaaaagagaatgcaggattagcctttcccacggctacagcacttgactccactacccagattgtcatcactttccatgttacggccatcagacaaattgactggcggcacgacgaagagcaccatcaccatcaccatcaccatcaccat

SEQ ID NO: 28 - DNA, 2604 bp, synthetic construct
  misc_feature 1..2604: note = maize preferred codons
  source 1..2604: mol_type = other DNA
atggctgcactggtcgactacggcaagctgttcgaggacctcaaccagatctcgatgggagtcctggaccgcgtcgagttctccgaggtgatggtgatccaccgcatgtacgtccgccttgccgacctgaacgtcggacagctggagggagccgagaaggtcaagcgcctgtacgtgttcgcggatgtcgtcgagctgccggtcgtcgagtggaggtggccacctcagatcccaggttccgtgaccgtgatcatcctctgccggctcctccagtggccgacagacggcaggcagtctgacaccgagctgcacctgaccttcatgaagctgcacgccatccagcgcgaggagaaccgctgggagatcaccgctgccgacggcatgaactggggtgtgtacatccacgccgaggaggtccaagtgggcgtcctcacgatgtcctggtcgagcgtgctgagggtttccgcgctcaggtcggtcatcaccagcggattccgggcggtcagcgtgttcgaggttcccggatctgtgaggagcacgctgggtgccaccttgaggcctgatcacgcgctgtactcgaccaccatgcaagccacgcccaacgccagccacatctcggccttcaacctgcgcatcgtgagcccgtcagcctatcgcgtgtgtccgctccagaacgacaccgacacctacctgggcatccctgcagatgtcgcagccgttctcccggtcgacgtcgttaccgacccgaacatcctgctgggcatgcagaccaccgtccacatcgccgagctcgtgaaggcttgccacccgtctcctgacgtcgtctcggcggtcggagagcacctgaactggctgaacaagctcctcctgccgctcaaggagtcgacgcagctccaaggctccgagtcctacaaggagtgcctcgccctcctcggacgggttcacgccgcgatgaagatggtgcgcatagggctggtggtccctcagctgcagtaccgcatgtacgggagcctgatcaaccagatggcccaggtggcccagaactacgaccgcgagttcaagcagttcaagctgttcatcatccagaaccagatcctcgggtcgtacctcctgcagcaaaaccgggcgttcgctgagagggagctgcagatggagtccttccacgccgccgtgatctcccagaggcgggaggagctcgacaacacgttcgcgaagatggaccgcctgtccgggcagatggaggcggagtcctcggcgatggagcaggccaagaaggagatggacgagggcctcaggcagttccagaaccggcaggtcgcgaacgcactcttcgccgtgttgtccgcagtggctcagataggcctcgccttcctgaccgcaggcgctacagccccaggagcggttgccagcgctggacaagcggtctcgatcgcaggtcaggctgcacagggactcagacgcgtggtggagatcctggagcagctggaggccgtcatggaggtcgtggcagccgtgaaggacctcgtcgacagcctcgagcaggtcggtcagatcgtcgacgctccagtcatgcccgagttgccgagcgaagccgactggtccatcttcgtcaacgaggtggaggcagtggcagagggtatgcccaccgaggtctctgaggtgcccgtgtggagggcgaagtgcaagaacgtcgctgccttgggccgcgagatgtcgatcacggccgtgcagatgtccgagctccagtacgacatctgggtccaagggatgatgcgcgacatggcgaggagccaggctgatcgcttggccgcgatccagccagcggacctcacgaactacctggagatggcgacccagatggacatgcggacgacccgcatgctgctcgggctcctgaacatcctccgcatccagaacgcggccctgcgctacgagtacctgctgatgcccaccgagctgaccacctggccgttgggtatggacaccgtcggcgacctcctgattgcgcaggagaacgccgcgctcatcggactgatgcagctcggcccatcgtccgacttcaccagcaggcacgtcgtcaaggacatccccgtgaacctgctgctcgacggcgaggactgggagttcgagatcccagttcaggccggcatgagctcgttcccgtccagctggagcagggtccggatacgccacctcgagatgcacttcgtgaaggaggcctcgggcatcggaggcgagatcatccaccagccgaccacgcagacgggcacggtgtacatcctgctgcaaggctcgaccatcttccacgaccgcagacgcgaccaggtcctcccgttccaagccgcagcaccgctgaactaccactacgcgtaccgccttgacaccggtgactccaccttgaccaacgagcccagcgagcagttcgcgaacaagttcatgcagatgaccccgttcacccgctggaggctgaggctctccgcatctgcgaaggagaacgcgggtcttgcgttcccaacggcaacggccctcgactccacgacgcagatcgtcatcaccttccacgtcaccgcgatcaggcagatcgactggcgccacgacgaggag

SEQ ID NO: 29 - DNA, 2604 bp, synthetic construct
  misc_feature 1..2604: note = maize preferred codons
  source 1..2604: mol_type = other DNA
atggcagcactggtggactacggcaagctcttcgaggacctcaaccagatctctatgggcgtcctggaccgggtcgagttcagcgaggtgatggtgatccaccggatgtacgtgaggctcgccgaccttaacgtgggccagctcgagggtgccgagaaggtgaagcggctgtacgtcttcgccgacgtggtcgagctgccagtggtcgagtggaggtggcctccgcagatcccgggtagcgtgaccgtcatcatcctctgccgcctgcttcagtggcccactgacggacggcagtcagacaccgagctgcacctcaccttcatgaagctgcacgcgatccagcgggaggagaaccggtgggagatcacggcagccgacggcatgaactggggcgtctacatccacgcggaggaggtccaagtgggcgtgctgacgatgtcgtggtcgagcgtgctcagggtttccgcgctgaggagcgtcatcaccagcggctttcgggcagtgtccgtcttcgaggtgccaggctcagtcaggtccacgctcggagccaccctcagacccgatcacgcgctctactccaccaccatgcaagccacgccgaacgcgtcccacatcagcgcgttcaacctccggatagtcagcccatccgcctatcgcgtctgcccgctgcagaacgacaccgacacgtacctcggcattcccgcagacgttgccgcagtcctgcccgtcgatgtggtcaccgacccgaacatcctgctcggcatgcagacgacggtgcacatcgctgagctcgtcaaagcctgccaccctagcccagatgtggtgtcagccgtcggagagcacctgaactggctcaacaagctcctgctgccgctcaaggagtcgacccagctgcaagggtcggagtcctacaaggagtgcctcgcgctgctcggacgggttcacgccgccatgaagatggtccggatcgggttggtcgtgccacagctccagtaccggatgtacggctcgctcatcaaccagatggcccaggtggcccagaactacgaccgggagttcaagcagttcaagctgttcatcatccagaaccagatcctcggctcgtacctgctgcagcagaaccgggcgttcgctgagagggagctgcagatggagtcgttccacgcagccgtgatctcgcagaggcgcgaggagctggacaacaccttcgcgaagatggaccgcctcagcggccagatggaagccgagtcgtccgcgatggagcaggcgaagaaggagatggacgagggcctccggcagttccagaaccggcaggtggcgaacgccctcttcgctgtgcttagcgccgtggctcagatcgggttggcgtttctcaccgccggagccacagctcctggtgcagtggcgtcagcaggtcaagcggtctcgatagccggccaggcagcgcaagggctgaggagggtggtcgagatcctcgagcagctcgaagccgtcatggaggtggtcgccgctgtcaaggacctggtggacagcctcgagcaagtcggccagatcgtggacgcgccagtgatgcccgagttgcccagcgaagcggactggtccatcttcgtgaacgaggtggaggcggtggcagagggcatgcctaccgaggtgagcgaggtgccagtctggagggcgaagtgcaagaacgtcgcggcgctgggtcgggagatgtcgatcaccgcggttcagatgtcggagctccagtacgacatctgggtgcaagggatgatgcgggacatggcgaggtcgcaagccgatcgccttgctgcgatccagcctgccgacctgacgaactacctggagatggccacccagatggacatgcggaccacgcgcatgctcctcggcctgctcaacatcctccgcatccagaacgcggcgctccgctacgagtacctgctgatgcccaccgagctcacgacctggccactcggcatggacaccgttggcgacctcctcatcgcccaggagaacgcggccctcatagggctcatgcagctgggaccgtcgagcgacttcacctcgaggcacgtggtcaaggacatccccgtcaacctgctcctggacggcgaggactgggagttcgagatcccggttcaagccggcatgtcctcgttcccgtcgagctggtcgagagtgcgcatccggcacctggagatgcacttcgtgaaggaggccagcgggataggcggtgagatcatccaccagcccacgacgcagaccggcaccgtgtacatcctcctccaagggtccacgatcttccacgaccggaggcgggatcaggtcttgcccttccaagcggctgcacctctgaactaccactacgcgtatcggctggacaccggcgactcgaccctcaccaacgagccgtccgagcagttcgcgaacaagttcatgcagatgacgcccttcacgcgctggaggctgaggttgtccgcatccgccaaggagaacgctggactcgcctttccgaccgctacggcactcgactccacgacccagatcgtgatcacgttccacgtcaccgccatccgccagatcgactggcggcacgacgaggag

SEQ ID NO: 30 - DNA, 26 bp, synthetic construct
  misc_feature 1..26: note = gene primer
  source 1..26: mol_type = other DNA
ccatggctctcgtggattacggcaag

SEQ ID NO: 31 - DNA, 30 bp, synthetic construct
  misc_feature 1..30: note = gene primer
  source 1..30: mol_type = other DNA
gttaacctactcttcgtcgtgccgccagtc

SEQ ID NO: 32 - DNA, 41 bp, synthetic construct
  misc_feature 1..41: note = gene primer
  source 1..41: mol_type = other DNA
tttaacttagcctaggatccatggaatatagcagcttgtac

SEQ ID NO: 33 - DNA, 42 bp, synthetic construct
  misc_feature 1..42: note = gene primer
  source 1..42: mol_type = other DNA
actccttctttagttaacttactccacatcaccctcttgtcg

SEQ ID NO: 34 - protein, 809 aa, Asplenium sp.
  source 1..809: note = Asplenium australasicum
MAAGDYSVLYQDVNQISIRLEKMDFSEVMAVHRMFVRMDDLDVSSGTGLLSGAEKVKRLYVFADVVELPSKQLRLPGTDLIVILCRIFVTNGRHSTELFLPSMNMSMVAPGTGSIRGVILSPTTVLTTSSDALQFKLQSGSMTSVMRLKDVSVAATLTCNVQAASASMPLTVKTTGTSPGNICVLGMSTAVVVPESAVAVITDANILLGMQVTVLIAELVKIAHNSDVLIAAVTRHVEWLNHLLVQAHAAAPSEDVVALLYRTQGFIKLRNEGLIVPRLQYRMYKDLIDRMVQVAQSYDQDFKQLKLFVEQNKILGSYLLEQNKAFAEKEKDMDAFHSQVIDLRTSELESTIERMDDLSKQMEEQNAAMEQAKADMDAGLIAYQNKQVANAVFAVLGAIASIGLAFATGGATAPGAVASAGAAVTAAGKAAEGLKKVVEILEGLQAVMEVVAVIKELVQSLQEIGQLVDAPEMPDLPSDAEWEIFVNEVEAVAEQMPTEVTEVPAWKAKCKNVAALGREMSTMAAHIAELQFEIQVQEMLREIAKKQADRLSSIKPADLTNYLEMVSEMDMRTTRMLLELIRVLYIQNAALQYEYLQTPAPLNAWPVTMQTVWGLLVQQETAAINGLLQMGAPSDYTQEYAVRDVPVRLLLGGGDWEFELPVRNADFPLTWCRVRIRYVDMRFDAAAEHLPVTSTGEVYMLLQSSRFFEDRAKRENEFISYEGGMGLQYQYAYRLATGDATVTNVPSEEYANTFMRLAPFTRWRLRLSASAPENKGLAFPTATLADATTRIKITFHVSAIRRISTRVAV

SEQ ID NO: 35 - protein, 807 aa, Polypodium sp.
  source 1..807: note = Polypodium musifolium
MADLDYSKLYQDLNQISVRLEKTEFSEVMVVHRMFVRMDDLDVSSGSGLLSGAEKVKRLYVFADVVELPSKQVRLAGTDMIVVFCRIFVPEGRHYAELFLPSMNMSMVGADGEGSIRGVILSPTVLTTLSNALQFRLECGSMTSVMRLNDVSAGATLTCNVQAASACVPLKVKTTGTSPGNICVLGLSTAAVVPESVVAVITDANILLGMQVTVLIAELVKIAHNSDGVIAAVTRHVEWLNHLLVQAQAAAPSEDVVALLYRTQAFIKLRKEGLIVPRLQYHMYKDLIDRMVQVAQSYDQDFKQMKLYVEQNKILGSYLLEQNKAFAEKEKDMDASHSQVIALRTSELQSTIERMDDLSKQMEVQSTAMEKAKADMDAGLIVYQNKQVADAVFAVMEAIASIGLAFATGGATAPGAVASAGAAVSAAGKAGEGLKKVVEILEGLQAIMEVIAAIKGLVQSLQKIGQLVNAPEMPDLPSEAEWEMFVKEVEAVAAQMPTEVTQVPAWTAKCKNVAALGREMSTTAAHIAELQYEIQVQGMLQQIAKKQADRLSSIKPADLTNYFEMVSEMDMRTTRMLLELIQVLNIQNGALRYEYLQPAAPLNAWPVTMQTVWGLLVQQEAAAINGLLQLGAPSDFTREYVVGDIPVKLLLGGGDWEFELPVTDADFPLTWCRVRIQHVDMQFDAAAEHLPTTSTGEVYMLLQSSRFFEDRAQHEDEFISYEAGTGLQYQYAYRLATGEATVTNVPSEAYVNTFMLLAPFTRWRLRLSSSAPENKGLAFPTATSADATTRIKITFHVSAIRRISLAR

SEQ ID NO: 36 - protein, 813 aa, Adiantum pedatum
MADIDYSVLYNDVNQISIRLERMDFSEVMAVHRMFVRMDDLDVSSGTGVLEGAQNVKRLYVFADVVELPSKQVRLPGSDMIVILCRIFVRNGRHNTELFLPSMNMSMVAAGNGTIRGVNLSTTMSSSSSNALQFNLRSGSMTSTVRLKDVDVAAALTCDVQAASASMPLTVMTTGTSPGNIWVLGMTTAVVIPESAVAVITDANILLGMQVTVLIAELVKTAHNSDVIIAAITRHVEWLNHLLVQAHAAAPNEDVITLLYRTQAFIKLKREGLVVPRLQYHMYKNLIDRMVQVAQNYDQDFRQLKLFVEQNKILGSYLLEQNKAFAEKEKDMDAFHSQIIALRTTELNNTIERMGELSKQMDQENEAMEQAKADMDAGLIEYQNRQVANALFAVLGAIASIGLAFATGGATAPGAVSAAGAAVTAAGKAAEGLKKVVEILEGLQVVMEVVAAIKELVQSLQQIGQLVDAPEMPDLPSNADWEIFVNEVEAVAEQMPTEVTQVAAWKAKCKNVAALGREMSTMAAHIAELQYQIQVQEMLREIAQKQADRLSSISPADLTNYLEMVSQMDMRTTRMLLELIRVLYIQNAALQYEYLQTPAPLNAWPVAMQTVWGLLIQQETTAITGLLQLGAPSDFTQEYVVKDIPVSLLLEGRDWEFELPVLNADFPSTWSRVRIHHVDMQFDAAATSIHIPTTNTGVVYLLLQSSRFFDDRARRANEFISYEAGTGLFYQYAYRLATGEATVTNIPTDEYANTFMRLTPFTRWRLRLSLSAEENAGLAFPTATSADDTTQIKITFHVSAIRRISTRSDGVSS

SEQ ID NO: 37 - protein, 5 aa, synthetic construct
  REGION 1..5: note = polypeptide linker
EEKKN

SEQ ID NO: 38 - DNA, 44 bp, synthetic construct
  misc_feature 1..44: note = mutagenesis primer
  misc_difference 22: note = n = a, c, g or t
  misc_difference 23: note = n = a, c, g or t
  misc_difference 24: note = k = g or t
  source 1..44: mol_type = other DNA
cagctcgagggagccgagaaannkaagcggttgtatgtgtttgc

SEQ ID NO: 39 - DNA, 43 bp, synthetic construct
  misc_feature 1..43: note = mutagenesis primer
  misc_difference 20: note = n = a, c, g or t
  misc_difference 21: note = n = a, c, g or t
  misc_difference 22: note = k = g or t
  source 1..43: mol_type = other DNA
cgagggagccgagaaagtgnnkcggttgtatgtgtttgcggac

SEQ ID NO: 40 - DNA, 43 bp, synthetic construct
  misc_feature 1..43: note = mutagenesis primer
  misc_difference 22: note = m = a or c
  misc_difference 23: note = n = a, c, g or t
  misc_difference 24: note = n = a, c, g or t
  source 1..43: mol_type = other DNA
gtccgcaaacacatacaaccgmnncactttctcggctccctcg

SEQ ID NO: 41 - DNA, 44 bp, synthetic construct
  misc_feature 1..44: note = mutagenesis primer
  misc_difference 21: note = n = a, c, g or t
  misc_difference 22: note = n = a, c, g or t
  misc_difference 23: note = k = g or t
  source 1..44: mol_type = other DNA
agggagccgagaaagtgaagnnkttgtatgtgtttgcggacgtg

SEQ ID NO: 42 - DNA, 44 bp, synthetic construct
  misc_feature 1..44: note = mutagenesis primer
  misc_difference 22: note = m = a or c
  misc_difference 23: note = n = a, c, g or t
  misc_difference 24: note = n = a, c, g or t
  source 1..44: mol_type = other DNA
cacgtccgcaaacacatacaamnncttcactttctcggctccct

SEQ ID NO: 43 - DNA, 42 bp, synthetic construct
  misc_feature 1..42: note = mutagenesis primer
  misc_difference 21: note = n = a, c, g or t
  misc_difference 22: note = n = a, c, g or t
  misc_difference 23: note = k = g or t
  source 1..42: mol_type = other DNA
gagccgagaaagtgaagcggnnktatgtgtttgcggacgtgg

SEQ ID NO: 44 - DNA, 42 bp, synthetic construct
  misc_feature 1..42: note = mutagenesis primer
  misc_difference 20: note = m = a or c
  misc_difference 21: note = n = a, c, g or t
  misc_difference 22: note = n = a, c, g or t
  source 1..42: mol_type = other DNA
ccacgtccgcaaacacatamnnccgcttcactttctcggctc

SEQ ID NO: 45 - DNA, 44 bp, synthetic construct
  misc_feature 1..44: note = mutagenesis primer
  misc_difference 21: note = n = a, c, g or t
  misc_difference 22: note = n = a, c, g or t
  misc_difference 23: note = k = g or t
  source 1..44: mol_type = other DNA
ccgagaaagtgaagcggttgnnkgtgtttgcggacgtggtggag

SEQ ID NO: 46 - DNA, 44 bp, synthetic construct
  misc_feature 1..44: note = mutagenesis primer
  misc_difference 22: note = m = a or c
  misc_difference 23: note = n = a, c, g or t
  misc_difference 24: note = n = a, c, g or t
  source 1..44: mol_type = other DNA
ctccaccacgtccgcaaacacmnncaaccgcttcactttctcgg

SEQ ID NO: 47 - DNA, 46 bp, synthetic construct
  misc_feature 1..46: note = mutagenesis primer
  misc_difference 22: note = n = a, c, g or t
  misc_difference 23: note = n = a, c, g or t
  misc_difference 24: note = k = g or t
  source 1..46: mol_type = other DNA
gagaaagtgaagcggttgtatnnktttgcggacgtggtggagctac

SEQ ID NO: 48 - DNA, 46 bp, synthetic construct
  misc_feature 1..46: note = mutagenesis primer
  misc_difference 23: note = m = a or c
  misc_difference 24: note = n = a, c, g or t
  misc_difference 25: note = n = a, c, g or t
  source 1..46: mol_type = other DNA
gtagctccaccacgtccgcaaamnnatacaaccgcttcactttctc

SEQ ID NO: 49 - DNA, 43 bp, synthetic construct
  misc_feature 1..43: note = mutagenesis primer
  misc_difference 21: note = n = a, c, g or t
  misc_difference 22: note = n = a, c, g or t
  misc_difference 23: note = k = g or t
  source 1..43: mol_type = other DNA
aagtgaagcggttgtatgtgnnkgcggacgtggtggagctacc

SEQ ID NO: 50 - DNA, 43 bp, synthetic construct
  misc_feature 1..43: note = mutagenesis primer
  misc_difference 21: note = m = a or c
  misc_difference 22: note = n = a, c, g or t
  misc_difference 23: note = n = a, c, g or t
  source 1..43: mol_type = other DNA
ggtagctccaccacgtccgcmnncacatacaaccgcttcactt

SEQ ID NO: 51 - DNA, 46 bp, synthetic construct
  misc_feature 1..46: note = mutagenesis primer
  misc_difference 22: note = n = a, c, g or t
  misc_difference 23: note = n = a, c, g or t
  misc_difference 24: note = k = g or t
  source 1..46: mol_type = other DNA
gtgaagcggttgtatgtgtttnnkgacgtggtggagctaccagtcg

SEQ ID NO: 52 - DNA, 46 bp, synthetic construct
  misc_feature 1..46: note = mutagenesis primer
  misc_difference 23: note = m = a or c
  misc_difference 24..25: note = n = a, c, g or t
  source 1..46: mol_type = other DNA
cgactggtagctccaccacgtcmnnaaacacatacaaccgcttcac

SEQ ID NO: 53 - DNA, 47 bp, synthetic construct
  misc_feature 1..47: note = mutagenesis primer
  misc_difference 23..24: note = n = a, c, g or t
  misc_difference 25: note = k = g or t
  source 1..47: mol_type = other DNA
gaagcggttgtatgtgtttgcgnnkgtggtggagctaccagtcgtgg

SEQ ID NO: 54 - DNA, 47 bp, synthetic construct
  misc_feature 1..47: note = mutagenesis primer
  misc_difference 23: note = m = a or c
  misc_difference 24..25: note = n = a, c, g or t
  source 1..47: mol_type = other DNA
ccacgactggtagctccaccacmnncgcaaacacatacaaccgcttc

SEQ ID NO: 55 - DNA, 42 bp, synthetic construct
  misc_feature 1..42: note = mutagenesis primer
  misc_difference 21..22: note = n = a, c, g or t
  misc_difference 23: note = k = g or t
  source 1..42: mol_type = other DNA
ggttgtatgtgtttgcggacnnkgtggagctaccagtcgtgg

SEQ ID NO: 56 - DNA, 42 bp, synthetic construct
  misc_feature 1..42: note = mutagenesis primer
  misc_difference 20: note = m = a or c
  misc_difference 21..22: note = n = a, c, g or t
  source 1..42: mol_type = other DNA
ccacgactggtagctccacmnngtccgcaaacacatacaacc

SEQ ID NO: 57 - DNA, 44 bp, synthetic construct
  misc_feature 1..44: note = mutagenesis primer
  misc_difference 21..22: note = n = a, c, g or t
  misc_difference 23: note = k = g or t
  source 1..44: mol_type = other DNA
tgtatgtgtttgcggacgtgnnkgagctaccagtcgtggaatgg

SEQ ID NO: 58 - DNA, 44 bp, synthetic construct
  misc_feature 1..44: note = mutagenesis primer
  misc_difference 22: note = m = a or c
  misc_difference 23..24: note = n = a, c, g or t
  source 1..44: mol_type = other DNA
ccattccacgactggtagctcmnncacgtccgcaaacacataca

SEQ ID NO: 59 - DNA, 43 bp, synthetic construct
  misc_feature 1..43: note = mutagenesis primer
  misc_difference 21..22: note = n = a, c, g or t
  misc_difference 23: note = k = g or t
  source 1..43: mol_type = other DNA
atgtgtttgcggacgtggtgnnkctaccagtcgtggaatggcg

SEQ ID NO: 60 - DNA, 43 bp, synthetic construct
  misc_feature 1..43: note = mutagenesis primer
  misc_difference 21: note = m = a or c
  misc_difference 22..23: note = n = a, c, g or t
  source 1..43: mol_type = other DNA
cgccattccacgactggtagmnncaccacgtccgcaaacacat

SEQ ID NO: 61 - DNA, 43 bp, synthetic construct
  misc_feature 1..43: note = mutagenesis primer
  misc_difference 21..22: note = n = a, c, g or t
  misc_difference 23: note = k = g or t
  source 1..43: mol_type = other DNA
tgtttgcggacgtggtggagnnkccagtcgtggaatggcggtg

SEQ ID NO: 62 - DNA, 43 bp, synthetic construct
  misc_feature 1..43: note = mutagenesis primer
  misc_difference 21: note = m = a or c
  misc_difference 22..23: note = n = a, c, g or t
  source 1..43: mol_type = other DNA
caccgccattccacgactggmnnctccaccacgtccgcaaaca

SEQ ID NO: 63 - DNA, 45 bp, synthetic construct
  misc_feature 1..45: note = mutagenesis primer
  misc_difference 23..24: note = n = a, c, g or t
  misc_difference 25: note = k = g or t
  source 1..45: mol_type = other DNA
gtttgcggacgtggtggagctannkgtcgtggaatggcggtggcc

SEQ ID NO: 64 - DNA, 45 bp, synthetic construct
  misc_feature 1..45: note = mutagenesis primer
  misc_difference 21: note = m = a or c
  misc_difference 22..23: note = n = a, c, g or t
  source 1..45: mol_type = other DNA
ggccaccgccattccacgacmnntagctccaccacgtccgcaaac

SEQ ID NO: 65 - DNA, 55 bp, synthetic construct
  misc_feature 1..55: note = mutagenesis primer
  misc_difference 22..23: note = n = a, c, g or t
  misc_difference 24: note = k = g or t
  misc_difference 32..33: note = n is a, c, g, or t
  source 1..55: mol_type = other DNA
caagcaattcaaattattcatcatccaaaatnnkatccttggcagctatttgctg

SEQ ID NO: 66 - DNA, 53 bp, synthetic construct
  misc_feature 1..53: note = mutagenesis primer
  misc_difference 20: note = m = a or c
  misc_difference 21..22: note = n = a, c, g or t
  source 1..53: mol_type = other DNA
gcaaatagctgccaaggatmnnattttggatgatgaataatttgaattgcttg

SEQ ID NO: 67 - DNA, 53 bp, synthetic construct
  misc_feature 1..53: note = mutagenesis primer
  misc_difference 32..33: note = n = a, c, g or t
  misc_difference 34: note = k = g or t
  source 1..53: mol_type = other DNA
gcaattcaaattattcatcatccaaaatcaannkcttggcagctatttgctgc

SEQ ID NO: 68 - DNA, 53 bp, synthetic construct
  misc_feature 1..53: note = mutagenesis primer
  misc_difference 20: note = m = a or c
  misc_difference 21..22: note = n = a, c, g or t
  source 1..53: mol_type = other DNA
gcagcaaatagctgccaagmnnttgattttggatgatgaataatttgaattgc

SEQ ID NO: 69 - DNA, 56 bp, synthetic construct
  misc_feature 1..56: note = mutagenesis primer
  misc_difference 35..36: note = n = a, c, g or t
  misc_difference 37: note = k = g or t
  source 1..56: mol_type = other DNA
gcaattcaaattattcatcatccaaaatcaaatcnnkggcagctatttgctgcagc

SEQ ID NO: 70 - DNA, 56 bp, synthetic construct
  misc_feature 1..56: note = mutagenesis primer
  misc_difference 20: note = m = a or c
  misc_difference 21..22: note = n = a, c, g or t
  source 1..56: mol_type = other DNA
gctgcagcaaatagctgccmnngatttgattttggatgatgaataatttgaattgc

SEQ ID NO: 71 - DNA, 52 bp, synthetic construct
  misc_feature 1..52: note = mutagenesis primer
  misc_difference 32..33: note = n = a, c, g or t
  misc_difference 34: note = K = g or t
  source 1..52: mol_type = other DNA
caaattattcatcatccaaaatcaaatccttnnkagctatttgctgcagcag

SEQ ID NO: 72 - DNA, 52 bp, synthetic construct
  misc_feature 1..52: note = mutagenesis primer
  misc_difference 19: note = m = a or c
  misc_difference 20..21: note = n = a, c, g or t
  source 1..52: mol_type = other DNA
ctgctgcagcaaatagctmnnaaggatttgattttggatgatgaataatttg

SEQ ID NO: 73 - DNA, 48 bp, synthetic construct
  misc_feature 1..48: note = mutagenesis primer
  misc_difference 26..27: note = n = a, c, g or t
  misc_difference 28: note = k = g or t
  source 1..48: mol_type = other DNA
catcatccaaaatcaaatccttggcnnktatttgctgcagcagaacag

SEQ ID NO: 74 - DNA, 48 bp, synthetic construct
  misc_feature 1..48: note = mutagenesis primer
  misc_difference 21: note = m = a or c
  misc_difference 22..23: note = n = a, c, g or t
  source 1..48: mol_type = other DNA
ctgttctgctgcagcaaatamnngccaaggatttgattttggatgatg

SEQ ID NO: 75 - DNA, 43 bp, synthetic construct
  misc_feature 1..43: note = mutagenesis primer
  misc_difference 23..24: note = n = a, c, g or t
  misc_difference 25: note = k = g or t
  source 1..43: mol_type = other DNA
ccaaaatcaaatccttggcagcnnkttgctgcagcagaacagg

SEQ ID NO: 76 - DNA, 43 bp, synthetic construct
  misc_feature 1..43: note = mutagenesis primer
  misc_difference 19: note = m = a or c
  misc_difference 20..21: note = n = a, c, g or t
  source 1..43: mol_type = other DNA
cctgttctgctgcagcaamnngctgccaaggatttgattttgg

SEQ ID NO: 77 - DNA, 50 bp, synthetic construct
  misc_feature 1..50: note = mutagenesis primer
  misc_difference 26..27: note = n = a, c, g or t
  misc_difference 28: note = k = g or t
  source 1..50: mol_type = other DNA
ccaaaatcaaatccttggcagctatnnkctgcagcagaacagggcatttg

SEQ ID NO: 78 - DNA, 50 bp, synthetic construct
  misc_feature 1..50: note = mutagenesis primer
  misc_difference 23: note = m = a or c
  misc_difference 24..25: note = n = a, c, g or t
  source 1..50: mol_type = other DNA
caaatgccctgttctgctgcagmnnatagctgccaaggatttgattttgg

SEQ ID NO: 79 - DNA, 43 bp, synthetic construct
  misc_feature 1..43: note = mutagenesis primer
  misc_difference 22..23: note = n = a, c, g or t
  misc_difference 24: note = k = g or t
  source 1..43: mol_type = other DNA
caaatccttggcagctatttgnnkcagcagaacagggcatttg

SEQ ID NO: 80 - DNA, 43 bp, synthetic construct
  misc_feature 1..43: note = mutagenesis primer
  misc_difference 20: note = m = a or c
  misc_difference 21..22: note = n = a, c, g or t
  source 1..43: mol_type = other DNA
caaatgccctgttctgctgmnncaaatagctgccaaggatttg

SEQ ID NO: 81 - DNA, 41 bp, synthetic construct
  misc_feature 1..41: note = mutagenesis primer
  misc_difference 20..21: note = n = a, c, g or t
  misc_difference 22: note = k = g or t
  source 1..41: mol_type = other DNA
ccttggcagctatttgctgnnkcagaacagggcatttgctg

SEQ ID NO: 82 - DNA, 41 bp, synthetic construct
  misc_feature 1..41: note = mutagenesis primer
  misc_difference 20: note = m = a or c
  misc_difference 21..22: note = n = a, c, g or t
  source 1..41: mol_type = other DNA
cagcaaatgccctgttctgmnncagcaaatagctgccaagg

SEQ ID NO: 83 - DNA, 41 bp, synthetic construct
  misc_feature 1..41: note = mutagenesis primer
  misc_difference 19..20: note = n = a, c, g or t
  misc_difference 21: note = k = g or t
  source 1..41: mol_type = other DNA
ggcagctatttgctgcagnnkaacagggcatttgctgagag

SEQ ID NO: 84 - DNA, 41 bp, synthetic construct
  misc_feature 1..41: note = mutagenesis primer
  misc_difference 21: note = m = a or c
  misc_difference 22..23: note = n = a, c, g or t
  source 1..41: mol_type = other DNA
ctctcagcaaatgccctgttmnnctgcagcaaatagctgcc

SEQ ID NO: 85 - DNA, 40 bp, synthetic construct
  misc_feature 1..40: note = mutagenesis primer
  misc_difference 20..21: note = n = a, c, g or t
  misc_difference 22: note = k = g or t
  source 1..40: mol_type = other DNA
cagctatttgctgcagcagnnkagggcatttgctgagagg

SEQ ID NO: 86 - DNA, 40 bp, synthetic construct
  misc_feature 1..40: note = mutagenesis primer
  misc_difference 19: note = m = a or c
  misc_difference 20..21: note = n = a, c, g or t
  source 1..40: mol_type = other DNA
cctctcagcaaatgccctmnnctgctgcagcaaatagctg

SEQ ID NO: 87 - DNA, 46 bp, synthetic construct
  misc_feature 1..46: note = mutagenesis primer
  misc_difference 22..23: note = n = a, c, g or t
  misc_difference 24: note = k = g or t
  source 1..46: mol_type = other DNA
gaagtctcggaggttccggtgnnkagggccaagtgcaagaatgtgg

SEQ ID NO: 88 - DNA, 46 bp, synthetic construct
  misc_feature 1..46: note = mutagenesis primer
  misc_difference 23: note = m = a or c
  misc_difference 24..25: note = n = a, c, g or t
  source 1..46: mol_type = other DNA
ccacattcttgcacttggccctmnncaccggaacctccgagacttc

SEQ ID NO: 89 - DNA, 44 bp, synthetic construct
  misc_feature 1..44: note = mutagenesis primer
  misc_difference 22..23: note = n = a, c, g or t
  misc_difference 24: note = k = g or t
  source 1..44: mol_type = other DNA
gtctcggaggttccggtgtggnnkgccaagtgcaagaatgtggc

SEQ ID NO: 90 - DNA, 44 bp, synthetic construct
  misc_feature 1..44: note = mutagenesis primer
  misc_difference 21: note = m = a or c
  misc_difference 22..23: note = n = a, c, g or t
  source 1..44: mol_type = other DNA
gccacattcttgcacttggcmnnccacaccggaacctccgagac

SEQ ID NO: 91 - DNA, 45 bp, synthetic construct
  misc_feature 1..45: note = mutagenesis primer
  misc_difference 21..22: note = n = a, c, g or t
  misc_difference 23: note = k = g or t
  source 1..45: mol_type = other DNA
cggaggttccggtgtggaggnnkaagtgcaagaatgtggctgcac

SEQ ID NO: 92 - DNA, 45 bp, synthetic construct
  misc_feature 1..45: note = mutagenesis primer
  misc_difference 23: note = m = a or c
  misc_difference 24..25: note = n = a, c, g or t
  source 1..45: mol_type = other DNA
gtgcagccacattcttgcacttmnncctccacaccggaacctccg

SEQ ID NO: 93 - DNA, 45 bp, synthetic construct
  misc_feature 1..45: note = mutagenesis primer
  misc_difference 22..23: note = n = a, c, g or t
  misc_difference 24: note = k = g or t
  source 1..45: mol_type = other DNA
gaggttccggtgtggagggccnnktgcaagaatgtggctgcactg

SEQ ID NO: 94 - DNA, 45 bp, synthetic construct
  misc_feature 1..45: note = mutagenesis primer
  misc_difference 22: note = m = a or c
  misc_difference 23..24: note = n = a, c, g or t
  source 1..45: mol_type = other DNA
cagtgcagccacattcttgcamnnggccctccacaccggaacctc

SEQ ID NO: 95 - DNA, 46 bp, synthetic construct
  misc_feature 1..46: note = mutagenesis primer
  misc_difference 22..23: note = n = a, c, g or t
  misc_difference 24: note = k = g or t
  source 1..46: mol_type = other DNA
gttccggtgtggagggccaagnnkaagaatgtggctgcactgggtc

SEQ ID NO: 96 - DNA, 46 bp, synthetic construct
  misc_feature 1..46: note = mutagenesis primer
  misc_difference 23: note = m = a or c
  misc_difference 24..25: note = n = a, c, g or t
  source 1..46: mol_type = other DNA
gacccagtgcagccacattcttmnncttggccctccacaccggaac

SEQ ID NO: 97 - DNA, 43 bp, synthetic construct
  misc_feature 1..43: note = mutagenesis primer
  misc_difference 21..22: note = n = a, c, g or t
  misc_difference 23: note = k = g or t
  source 1..43: mol_type = other DNA
cggtgtggagggccaagtgcnnkaatgtggctgcactgggtcg

SEQ ID NO: 98 - DNA, 43 bp, synthetic construct
  misc_feature 1..43: note = mutagenesis primer
  misc_difference 21: note = m = a or c
  misc_difference 22..23: note = n = a, c, g or t
  source 1..43: mol_type = other DNA
cgacccagtgcagccacattmnngcacttggccctccacaccg

SEQ ID NO: 99 - DNA, 45 bp, synthetic construct
  misc_feature 1..45: note = mutagenesis primer
  misc_difference 22..23: note = n = a, c, g or t
  misc_difference 24: note = k = g or t
  source 1..45: mol_type = other DNA
gtgtggagggccaagtgcaagnnkgtggctgcactgggtcgggag

SEQ ID NO: 100 - DNA, 45 bp, synthetic construct
  misc_feature 1..45: note = mutagenesis primer
  misc_difference 22: note = m = a or c
  misc_difference 23..24: note = n = a, c, g or t
  source 1..45: mol_type = other DNA
ctcccgacccagtgcagccacmnncttgcacttggccctccacac

SEQ ID NO: 101 - DNA, 44 bp, synthetic construct
  misc_feature 1..44: note = mutagenesis primer
  misc_difference 21..22: note = n = a, c, g or t
  misc_difference 23: note = k = g or t
  source 1..44: mol_type = other DNA
ggagggccaagtgcaagaatnnkgctgcactgggtcgggagatg

SEQ ID NO: 102 - DNA, 44 bp, synthetic construct
  misc_feature 1..44: note = mutagenesis primer
  misc_difference 22: note = m = a or c
  misc_difference 23..24: note = n = a, c, g or t
  source 1..44: mol_type = other DNA
catctcccgacccagtgcagcmnnattcttgcacttggccctcc

SEQ ID NO: 103 - DNA, 46 bp, synthetic construct
  misc_feature 1..46: note = mutagenesis primer
  misc_difference 23..24: note = n = a, c, g or t
  misc_difference 25: note = k = g or t
  source 1..46: mol_type = other DNA
gagggccaagtgcaagaatgtgnnkgcactgggtcgggagatgagc

SEQ ID NO: 104 - DNA, 46 bp, synthetic construct
  misc_feature 1..46: note = mutagenesis primer
  misc_difference 22: note = m = a or c
  misc_difference 23..24: note = n = a, c, g or t
  source 1..46: mol_type = other DNA
gctcatctcccgacccagtgcmnncacattcttgcacttggccctc

SEQ ID NO: 105 - DNA, 43 bp, synthetic construct
  misc_feature 1..43: note = mutagenesis primer
  misc_difference 21..22: note = n = a, c, g or t
  misc_difference 23: note = k = g or t
  source 1..43: mol_type = other DNA
cggcgctcaggtacgagtatnnkctaatgcccacggagctcac

SEQ ID NO: 106 - DNA, 43 bp, synthetic construct
  misc_feature 1..43: note = mutagenesis primer
  misc_difference 21: note = m = a or c
  misc_difference 22..23: note = n = a, c, g or t
  source 1..43: mol_type = other DNA
gtgagctccgtgggcattagmnnatactcgtacctgagcgccg

SEQ ID NO: 107 - DNA, 43 bp, synthetic construct
  misc_feature 1..43: note = mutagenesis primer
  misc_difference 21..22: note = n = a, c, g or t
  misc_difference 23: note = k = g or t
  source 1..43: mol_type = other DNA
cgctcaggtacgagtatcttnnkatgcccacggagctcacaac

SEQ ID NO: 108 - DNA, 43 bp, synthetic construct
  misc_feature 1..43: note = mutagenesis primer
  misc_difference 21: note = m = a or c
  misc_difference 22..23: note = n = a, c, g or t
  source 1..43: mol_type = other DNA
gttgtgagctccgtgggcatmnnaagatactcgtacctgagcg

SEQ ID NO: 109 - DNA, 46 bp, synthetic construct
  misc_feature 1..46: note = mutagenesis primer
  misc_difference 23..24: note = n = a, c, g or t
  misc_difference 25: note = k = g or t
  source 1..46: mol_type = other DNA
gctcaggtacgagtatcttctannkcccacggagctcacaacatgg

SEQ ID NO: 110 - DNA, 46 bp, synthetic construct
  misc_feature 1..46: note = mutagenesis primer
  misc_difference 22: note = m = a or c
  misc_difference 23..24: note = n = a, c, g or t
  source 1..46: mol_type = other DNA
ccatgttgtgagctccgtgggmnntagaagatactcgtacctgagc

SEQ ID NO: 111 - DNA, 43 bp, synthetic construct
  misc_feature 1..43: note = mutagenesis primer
  misc_difference 21..22: note = n = a, c, g or t
  misc_difference 23: note = k = g or t
  source 1..43: mol_type = other DNA
ggtacgagtatcttctaatgnnkacggagctcacaacatggcc

SEQ ID NO: 112 - DNA, 43 bp, synthetic construct
  misc_feature 1..43: note = mutagenesis primer
  misc_difference 21: note = m = a or c
  misc_difference 22..23: note = n = a, c, g or t
  source 1..43: mol_type = other DNA
ggccatgttgtgagctccgtmnncattagaagatactcgtacc

SEQ ID NO: 113 - DNA, 47 bp, synthetic construct
  misc_feature 1..47: note = mutagenesis primer
  misc_difference 24..25: note = n = a, c, g or t
  misc_difference 26: note = k = g or t
  source 1..47: mol_type = other DNA
ggtacgagtatcttctaatgcccnnkgagctcacaacatggccactg

SEQ ID NO: 114 - DNA, 47 bp, synthetic construct
  misc_feature 1..47: note = mutagenesis primer
  misc_difference 22: note = m = a or c
  misc_difference 22..24: note = n = a, c, g or t
  source 1..47: mol_type = other DNA
cagtggccatgttgtgagctcmnngggcattagaagatactcgtacc

SEQ ID NO: 115 - DNA, 45 bp, synthetic construct
  misc_feature 1..45: note = mutagenesis primer
  misc_difference 23..24: note = n = a, c, g or t
  misc_difference 25: note = k = g or t
  source 1..45: mol_type = other DNA
cgagtatcttctaatgcccacgnnkctcacaacatggccactggg

SEQ ID NO: 116 - DNA, 45 bp, synthetic construct
  misc_feature 1..45: note = mutagenesis primer
  misc_difference 21: note = m = a or c
  misc_difference 22..23: note = n = a, c, g or t
  source 1..45: mol_type = other DNA
cccagtggccatgttgtgagmnncgtgggcattagaagatactcg

SEQ ID NO: 117 - DNA, 49 bp, synthetic construct
  misc_feature 1..49: note = mutagenesis primer
  misc_difference 25..26: note = n = a, c, g or t
  misc_difference 27: note = k = g or t
  source 1..49: mol_type = other DNA
gagtatcttctaatgcccacggagnnkacaacatggccactgggtatgg

SEQ ID NO: 118 - DNA, 49 bp, synthetic construct
  misc_feature 1..49: note = mutagenesis primer
  misc_difference 23: note = m = a or c
  misc_difference 24..25: note = n = a, c, g or t
  source 1..49: mol_type = other DNA
ccatacccagtggccatgttgtmnnctccgtgggcattagaagatactc

SEQ ID NO: 119 - DNA, 47 bp, synthetic construct
  misc_feature 1..47: note = mutagenesis primer
  misc_difference 22..23: note = n = a, c, g or t
  misc_difference 24: note = k = g or t
  source 1..47: mol_type = other DNA
cttctaatgcccacggagctcnnkacatggccactgggtatggatac

SEQ ID NO: 120 - DNA, 47 bp, synthetic construct
  misc_feature 1..47: note = mutagenesis primer
  misc_difference 24: note = m = a or c
  misc_difference 25..26: note = n = a, c, g or t
  source 1..47: mol_type = other DNA
gtatccatacccagtggccatgtmnngagctccgtgggcattagaag

SEQ ID NO: 121 - DNA, 45 bp, synthetic construct
  misc_feature 1..45: note = mutagenesis primer
  misc_difference 22..23: note = n = a, c, g or t
  misc_difference 24: note = k = g or t
  source 1..45: mol_type = other DNA
ctaatgcccacggagctcacannktggccactgggtatggatacc

SEQ ID NO: 122 - DNA, 45 bp, synthetic construct
  misc_feature 1..45: note = mutagenesis primer
  misc_difference 22: note = m = a or c
  misc_difference 23..24: note = n = a, c, g or t
  source 1..45: mol_type = other DNA
ggtatccatacccagtggccamnntgtgagctccgtgggcattag

SEQ ID NO: 123 - DNA, 44 bp, synthetic construct
  misc_feature 1..44: note = mutagenesis primer
  misc_difference 20..21: note = n = a, c, g or t
  misc_difference 22: note = k = g or t
  source 1..44: mol_type = other DNA
gcccacggagctcacaacannkccactgggtatggataccgtgg

SEQ ID NO: 124 - DNA, 44 bp, synthetic construct
  misc_feature 1..44: note = mutagenesis primer
  misc_difference 23: note = m = a or c
  misc_difference 24..25: note = n = a, c, g or t
  source 1..44: mol_type = other DNA
ccacggtatccatacccagtggmnntgttgtgagctccgtgggc

SEQ ID NO: 125 - DNA, 47 bp, synthetic construct
  misc_feature 1..47: note = mutagenesis primer
  misc_difference 21..22: note = n = a, c, g or t
  misc_difference 23: note = k = g or t
  source 1..47: mol_type = other DNA
ccactatcttccatgaccgcnnkagagaccaggtgttgccttttcag

SEQ ID NO: 126 - DNA, 47 bp, synthetic construct
  misc_feature 1..47: note = mutagenesis primer
  misc_difference 25: note = m = a or c
  misc_difference 26..27: note = n = a, c, g or t
  source 1..47: mol_type = other DNA
ctgaaaaggcaacacctggtctctmnngcggtcatggaagatagtgg

SEQ ID NO: 127 - DNA, 45 bp, synthetic construct
  misc_feature 1..45: note = mutagenesis primer
  misc_difference 21..22: note = n = a, c, g or t
  misc_difference 23: note = k = g or t
  source 1..45: mol_type = other DNA
ctatcttccatgaccgcagannkgaccaggtgttgccttttcagg

SEQ ID NO: 128 - DNA, 45 bp, synthetic construct
  misc_feature 1..45: note = mutagenesis primer
  misc_difference 23: note = m = a or c
  misc_difference 24..25: note = n = a, c, g or t
  source 1..45: mol_type = other DNA
cctgaaaaggcaacacctggtcmnntctgcggtcatggaagatag

SEQ ID NO: 129 - DNA, 46 bp, synthetic construct
  misc_feature 1..46: note = mutagenesis primer
  misc_difference 24..25: note = n = a, c, g or t
  misc_difference 26: note = k = g or t
  source 1..46: mol_type = other DNA
ctatcttccatgaccgcagaagannkcaggtgttgccttttcaggc

SEQ ID NO: 130 - DNA, 46 bp, synthetic construct
  misc_feature 1..46: note = mutagenesis primer
  misc_difference 21: note = m = a or c
  misc_difference 22..23: note = n = a, c, g or t
  source 1..46: mol_type = other DNA
gcctgaaaaggcaacacctgmnntcttctgcggtcatggaagatag

SEQ ID NO: 131 - DNA, 45 bp, synthetic construct
  misc_feature 1..45: note = mutagenesis primer
  misc_difference 23..24: note = n = a, c, g or t
  misc_difference 25: note = k = g or t
  source 1..45: mol_type = other DNA
cttccatgaccgcagaagagacnnkgtgttgccttttcaggccgc

SEQ ID NO: 132 - DNA, 45 bp, synthetic construct
  misc_feature 1..45: note = mutagenesis primer
  misc_difference 21: note = m = a or c
  misc_difference 22..23: note = n = a, c, g or t
  source 1..45: mol_type = other DNA
gcggcctgaaaaggcaacacmnngtctcttctgcggtcatggaag

SEQ ID NO: 133 - DNA, 44 bp, synthetic construct
  misc_feature 1..44: note = mutagenesis primer
  misc_difference 22..23: note = n = a, c, g or t
  misc_difference 24: note = k = g or t
  source 1..44: mol_type = other DNA
catgaccgcagaagagaccagnnkttgccttttcaggccgctgc

SEQ ID NO: 134 - DNA, 44 bp, synthetic construct
  misc_feature 1..44: note = mutagenesis primer
  misc_difference 21: note = m = a or c
  misc_difference 22..23: note = n = a, c, g or t
  source 1..44: mol_type = other DNA
gcagcggcctgaaaaggcaamnnctggtctcttctgcggtcatg

SEQ ID NO: 135 - DNA, 44 bp, synthetic construct
  misc_feature 1..44: note = mutagenesis primer
  misc_difference 22..23: note = n = a, c, g or t
  misc_difference 24: note = k = g or t
  source 1..44: mol_type = other DNA
gaccgcagaagagaccaggtgnnkccttttcaggccgctgctcc

SEQ ID NO: 136 - DNA, 44 bp, synthetic construct
  misc_feature 1..44: note = mutagenesis primer
  misc_difference 21: note = m = a or c
  misc_difference 22..23: note = n = a, c, g or t
  source 1..44: mol_type = other DNA
ggagcagcggcctgaaaaggmnncacctggtctcttctgcggtc

SEQ ID NO: 137 - DNA, 44 bp, synthetic construct
  misc_feature 1..44: note = mutagenesis primer
  misc_difference 21..22: note = n = a, c, g or t
  misc_difference 23: note = k = g or t
  source 1..44: mol_type = other DNA
gcagaagagaccaggtgttgnnktttcaggccgctgctccgctc

SEQ ID NO: 138 - DNA, 44 bp, synthetic construct
  misc_feature 1..44: note = mutagenesis primer
  misc_difference 22: note = m = a or c
  misc_difference 23..24: note = n = a, c, g or t
  source 1..44: mol_type = other DNA
gagcggagcagcggcctgaaamnncaacacctggtctcttctgc

SEQ ID NO: 139 - DNA, 44 bp, synthetic construct
  misc_feature 1..44: note = mutagenesis primer
  misc_difference 21..22: note = n = a, c, g or t
  misc_difference 23: note = k = g or t
  source 1..44: mol_type = other DNA
gaagagaccaggtgttgcctnnkcaggccgctgctccgctcaac

SEQ ID NO: 140 - DNA, 44 bp, synthetic construct
  misc_feature 1..44: note = mutagenesis primer
  misc_difference 22: note = m = a or c
  misc_difference 23..24: note = n = a, c, g or t
  source 1..44: mol_type = other DNA
gttgagcggagcagcggcctgmnnaggcaacacctggtctcttc

SEQ ID NO: 141 - DNA, 44 bp, synthetic construct
  misc_feature 1..44: note = mutagenesis primer
  misc_difference 21..22: note = n = a, c, g or t
  misc_difference 23: note = k = g or t
  source 1..44: mol_type = other DNA
gagaccaggtgttgccttttnnkgccgctgctccgctcaactac

SEQ ID NO: 142 - DNA, 44 bp, synthetic construct
  misc_feature 1..44: note = mutagenesis primer
  misc_difference 22: note = m = a or c
  misc_difference 23..24: note = n = a, c, g or t
  source 1..44: mol_type = other DNA
gtagttgagcggagcagcggcmnnaaaaggcaacacctggtctc

SEQ ID NO: 143 - DNA, 43 bp, synthetic construct
  misc_feature 1..43: note = mutagenesis primer
  misc_difference 22..23: note = n = a, c, g or t
  misc_difference 24: note = k = g or t
  source 1..43: mol_type = other DNA
gaccaggtgttgccttttcagnnkgctgctccgctcaactacc

SEQ ID NO: 144 - DNA, 43 bp, synthetic construct
  misc_feature 1..43: note = mutagenesis primer
  misc_difference 20: note = m = a or c
  misc_difference 21..22: note = n = a, c, g or t
  source 1..43: mol_type = other DNA
ggtagttgagcggagcagcmnnctgaaaaggcaacacctggtc

SEQ ID NO: 145 - DNA, 47 bp, synthetic construct
  misc_feature 1..47: note = mutagenesis primer
  misc_difference 23..24: note = n = a, c, g or t
  misc_difference 25: note = k = g or t
  source 1..47: mol_type = other DNA
ccaggtgttgccttttcaggccnnkgctccgctcaactaccattacg

SEQ ID NO: 146 - DNA, 47 bp, synthetic construct
  misc_feature 1..47: note = mutagenesis primer
  misc_difference 23: note = m = a or c
  misc_difference 24..25: note = n = a, c, g or t
  source 1..47: mol_type = other DNA
cgtaatggtagttgagcggagcmnnggcctgaaaaggcaacacctgg

SEQ ID NO: 147 - DNA, 45 bp, synthetic construct
  misc_feature 1..45: note = mutagenesis primer
  misc_difference 22..23: note = n = a, c, g or t
  misc_difference 24: note = k = g or t
  source 1..45: mol_type = other DNA
gtgttgccttttcaggccgctnnkccgctcaactaccattacgcg

SEQ ID NO: 148 - DNA, 45 bp, synthetic construct
  misc_feature 1..45: note = mutagenesis primer
  misc_difference 22: note = m = a or c
  misc_difference 23..24: note = n = a, c, g or t
  source 1..45: mol_type = other DNA
cgcgtaatggtagttgagcggmnnagcggcctgaaaaggcaacac

SEQ ID NO: 149 - DNA, 46 bp, synthetic construct
  misc_feature 1..46: note = mutagenesis primer
  misc_difference 23..24: note = n = a, c, g or t
  misc_difference 25: note = k = g or t
  source 1..46: mol_type = other DNA
gttgccttttcaggccgctgctnnkctcaactaccattacgcgtac

SEQ ID NO: 150 - DNA, 46 bp, synthetic construct
  misc_feature 1..46: note = mutagenesis primer
  misc_difference 22: note = m = a or c
  misc_difference 23..24: note = n = a, c, g or t
  source 1..46: mol_type = other DNA
gtacgcgtaatggtagttgagmnnagcagcggcctgaaaaggcaac

SEQ ID NO: 151 - DNA, 44 bp, synthetic construct
  misc_feature 1..44: note = mutagenesis primer
  misc_difference 22..23: note = n = a, c, g or t
  misc_difference 24: note = k = g or t
  source 1..44: mol_type = other DNA
ccttttcaggccgctgctccgnnkaactaccattacgcgtaccg

SEQ ID NO: 152 - DNA, 44 bp, synthetic construct
  misc_feature 1..44: note = mutagenesis primer
  misc_difference 21: note = m = a or c
  misc_difference 22..23: note = n = a, c, g or t
  source 1..44: mol_type = other DNA
cggtacgcgtaatggtagttmnncggagcagcggcctgaaaagg

SEQ ID NO: 153 - DNA, 42 bp, synthetic construct
  misc_feature 1..42: note = mutagenesis primer
  misc_difference 19..20: note = n = a, c, g or t
  misc_difference 21: note = k = g or t
  source 1..42: mol_type = other DNA
caggccgctgctccgctcnnktaccattacgcgtaccgcctc

SEQ ID NO: 154 - DNA, 42 bp, synthetic construct
  misc_feature 1..42: note = mutagenesis primer
  misc_difference 22: note = m = a or c
  misc_difference 23..24: note = n = a, c, g or t
  source 1..42: mol_type = other DNA
gaggcggtacgcgtaatggtamnngagcggagcagcggcctg

SEQ ID NO: 155 - DNA, 45 bp, synthetic construct
  misc_feature 1..45: note = mutagenesis primer
  misc_difference 22..23: note = n = a, c, g or t
  misc_difference 24: note = k = g or t
  source 1..45: mol_type = other DNA
caggccgctgctccgctcaacnnkcattacgcgtaccgcctcgac

SEQ ID NO: 156 - DNA, 45 bp, synthetic construct
  misc_feature 1..45: note = mutagenesis primer
  misc_difference 22: note = m = a or c
  misc_difference 23..24: note = n = a, c, g or t
  source 1..45: mol_type = other DNA
gtcgaggcggtacgcgtaatgmnngttgagcggagcagcggcctg

SEQ ID NO: 157 - DNA, 78 bp, synthetic construct
  misc_feature 1..78: note = mutagenesis primer
  misc_difference 23: note = d = a, g or t
  misc_difference 26: note = r = a or g
  misc_difference 27: note = s = c or g
  misc_difference 28: note = y = c or t
  misc_difference 34: note = r = a or g
  misc_difference 40: note = d = a, g or t
  misc_difference 41: note = s = c or g
  misc_difference 46: note = r = a or g
  misc_difference 49: note = v = a, c or g
  misc_difference 53: note = w = a or t
  misc_difference 55: note = v = a, c or g
  source 1..78: mol_type = other DNA
ctcgagggagccgagaaagtgadgcrsytctatrtcttkdscgacrtcvtcgwgvtcccagtcgtggaatggcggtgg

SEQ ID NO: 158 - DNA, 78 bp, synthetic construct
  misc_feature 1..78: note = mutagenesis primer
  misc_difference 23: note = d = a, g or t
  misc_difference 26: note = r = a or g
  misc_difference 27: note = s = c or g
  misc_difference 28: note = y = c or t
  misc_difference 31: note = v = a, c or g
  misc_difference 34: note = r = a or g
  misc_difference 39: note = k = g or t
  misc_difference 40: note = d = a, g or t
  misc_difference 41: note = s = c or g
  misc_difference 46: note = r = a or g
  misc_difference 49: note = v = a, c or g
  misc_difference 53: note = w = a or t
  misc_difference 55: note = v = a, c or g
  source 1..78: mol_type = other DNA
ctcgagggagccgagaaagtgadgcrsytcvtcrtcttkdscgacrtcvtcgwgvtcccagtcgtggaatggcggtgg

SEQ ID NO: 159 - DNA, 78 bp, synthetic construct
  misc_feature 1..78: note = mutagenesis primer
  misc_difference 24: note = b = c, g or t
  misc_difference 26: note = w = a or t
  misc_difference 30: note = b = c, g or t
  misc_difference 33: note = y = c or t
  misc_difference 38: note = s = c or g
  misc_difference 39: note = h = a, c or t
  misc_difference 40: note = m = a or c
  misc_difference 45: note = y = c or t
  misc_difference 51: note = r = a or g
  misc_difference 52: note = s = c or g
  misc_difference 53: note = y = c or t
  misc_difference 56: note = h = a, c or t
  source 1..78: mol_type = other DNA
ccaccgccattccacgactgggabcwcgabgaygtcgshmaagayatagarsygchtcactttctcggctccctcgag

SEQ ID NO: 160 - DNA, 78 bp, synthetic construct
  misc_feature 1..78: note = mutagenesis primer
  misc_difference 24: note = b = c, g or t
  misc_difference 26: note = w = a or t
  misc_difference 30: note = b = c, g or t
  misc_difference 33: note = y = c or t
  misc_difference 38: note = s = c or g
  misc_difference 39: note = h = a, c or t
  misc_difference 40: note = m = a or c
  misc_difference 45: note = y = c or t
  misc_difference 48: note = b = c, g or t
  misc_difference 51: note = r = a or g
  misc_difference 52: note = s = c or g
  misc_difference 53: note = y = c or t
  misc_difference 56: note = h = a, c or t
  source 1..78: mol_type = other DNA
ccaccgccattccacgactgggabcwcgabgaygtcgshmaagaygabgarsygchtcactttctcggctccctcgag

SEQ ID NO: 161 - DNA, 84 bp, synthetic construct
  misc_feature 1..84: note = mutagenesis primer
  misc_difference 29: note = w = a or t
  misc_difference 33: note = b = c, g or t
  misc_difference 36: note = y = c or t
  misc_difference 42: note = h = a, c or t
  misc_difference 48: note = y = c or t
  misc_difference 55: note = s = c or g
  misc_difference 56: note = y = c or t
  misc_difference 59: note = h = a, c or t
  source 1..84: mol_type = other DNA
cggccaccgccattccacgactggtagcwcgabaaygtcgshaaaaayatacaasygchtcactttctcggctccctcgagctg

SEQ ID NO: 162 - DNA, 51 bp, synthetic construct
  misc_feature 1..51: note = cDNA cloning primer
  source 1..51: mol_type = other DNA
aatctctcatctaagaggctggatcctaggatggctctcgtggattacggc

SEQ ID NO: 163 - DNA, 52 bp, synthetic construct
  misc_feature 1..52: note = cDNA cloning primer
  source 1..52: mol_type = other DNA
tggccaatccagaagatggacaagtctagactactcttcgtcgtgccgccag

SEQ ID NO: 164 - DNA, 27 bp, synthetic construct
  misc_feature 1..27: note = mutagenesis primer
  source 1..27: mol_type = other DNA
ctaccagtcgtggaatggcggtggccg

SEQ ID NO: 165 - DNA, 63 bp, synthetic construct
  misc_feature 1..63: note = mutagenesis primer
  misc_difference 23: note = b = c, g or t
  misc_difference 24: note = s = c or g
  misc_difference 26: note = b = c, g or t
  misc_difference 28: note = m = a or c
  misc_difference 29: note = r = a or g
  misc_difference 36: note = s = c or g
  misc_difference 37: note = w = a or t
  misc_difference 38: note = s = c or g
  source 1..63: mol_type = other DNA
gtctcggaggttccggtgtggabsgbcmrgtgcaaswscgtggctgcactgggtcgggagatg

SEQ ID NO: 166 - DNA, 63 bp, synthetic construct
  misc_feature 1..63: note = mutagenesis primer
  misc_difference 23: note = w = a or t
  misc_difference 24: note = s = c or g
  misc_difference 26: note = b = c, g or t
  misc_difference 28: note = m = a or c
  misc_difference 29: note = r = a or g
  misc_difference 36: note = s = c or g
  misc_difference 37: note = w = a or t
  misc_difference 38: note = s = a or t
  source 1..63: mol_type = other DNA
gtctcggaggttccggtgtggcwsgbcmrgtgcaaswscgtggctgcactgggtcgggagatg

SEQ ID NO: 167 - DNA, 63 bp, synthetic construct
  misc_feature 1..63: note = mutagenesis primer
  misc_difference 23: note = b = c, g or t
  misc_difference 24: note = s = c or g
  misc_difference 26: note = b = c, g or t
  misc_difference 28: note = m = a or c
  misc_difference 29: note = r = a or g
  misc_difference 36: note = s = c or g
  misc_difference 37: note = m = a or c
  source 1..63: mol_type = other DNA
gtctcggaggttccggtgtggabsgbcmrgtgcaasmatgtggctgcactgggtcgggagatg

SEQ ID NO: 168 - DNA, 63 bp, synthetic construct
  misc_feature 1..63: note = mutagenesis primer
  misc_difference 23: note = w = a or t
  misc_difference 24: note = s = c or g
  misc_difference 26: note = b = c, g or t
  misc_difference 28: note = m = a or c
  misc_difference 29: note = r = a or g
  misc_difference 36: note = s = c or g
  misc_difference 37: note = m = a or c
  source 1..63: mol_type = other DNA
gtctcggaggttccggtgtggcwsgbcmrgtgcaasmatgtggctgcactgggtcgggagatg

SEQ ID NO: 169 - DNA, 51 bp, synthetic construct; identical to SEQ ID NO: 162
  misc_feature 1..51: note = mutagenesis primer
  source 1..51: mol_type = other DNA

SEQ ID NO: 170 - DNA, 52 bp, synthetic construct; identical to SEQ ID NO: 163
  misc_feature 1..52: note = mutagenesis primer
  source 1..52: mol_type = other DNA

SEQ ID NO: 171 - DNA, 25 bp, synthetic construct
  misc_feature 1..25: note = mutagenesis primer
  source 1..25: mol_type = other DNA
caccggaacctccgagacttccgtt

SEQ ID NO: 172 - DNA, 2601 bp, synthetic construct
  misc_feature 1..2601: note = PtIP-83 polypeptide variant encoding sequence
  source 1..2601: mol_type = other DNA
atggctctcgtggattacggcaagcttttcgaggatctgaaccagataagcatgggtgtactggatcgggtagagttttcagaggtgatggtgatccacaggatgtatgtgaggctagctgatctgaatgtggggcagctcgagggagccgagaaagtgaagcacttgtatattttttgcgacgttatcgagctaccagtcgtggaatggcggtggccgccgcaaataccaggatcggtgacggtgatcatattgtgtcgtcttcttcaatggccaactgatgggaggcagtcggacaccgagctccacctgacattcatgaagttgcatgccatacaacgagaggaaaatcggtgggagataaccgcagcagatggcatgaactggggagtttacatacacgcagaggaagtacaggttggcgtgctgacaatgtcatggtcttcggtacttagagtttcggcacttcgctctgttataacctccggctttcgcgccgttagtgtgtttgaggtaccgggaagtgtaaggtccacccttggagctactttaaggcccgatcacgccttatatagtacaactatgcaagccacacccaacgcatcgcatattagtgcttttaaccttcgcatagtttccccgtcggcatatcgtgtttgtcctctccaaaatgacacagatacctacttaggtattccagcagacgtggcggcagttcttccagtagacgtggtgactgatcctaacatcttgctgggcatgcagacaacggtacacattgcggagctagtcaaggcatgtcatccgtcacccgatgttgtgagcgctgtaggggagcacctgaactggctcaacaaactcttactcccacttaaggaatcgactcagttgcaaggaagcgagtcgtacaaggagtgccttgcactcttgggtcgtgttcacgctgcgatgaagatggtgagaattggcttagtagtgccccagctgcaatacagaatgtacggtagcctcatcaaccaaatggcccaagtagcacaaaactacgaccgagaattcaagcaattcaaattattcatcatccaaaatcaaatccttggcagctatttgctgcagcagaacagggcatttgctgagagggagctgcagatggagagctttcatgctgctgtcatttctcaaagaagggaggagttggacaatacattcgcaaagatggaccgattgagcgggcaaatggaggcagagagtagtgcaatggagcaagccaaaaaggaaatggacgaaggattgaggcagttccagaataggcaagttgcgaacgccctctttgccgttcttagcgctgtagctcagattgggcttgcattccttacggctggtgcaacggctcctggagctgtggcgtcggcggggcaagctgtgagcatagcaggtcaggcggcgcaaggtctgcgaagggtggtggaaattctagagcagctggaggctgtgatggaggttgtggctgctgtgaaggacctcgtggattcattggaacaggtaggtcagattgtggacgcaccggtgatgccggaattgccctcagaggcggactggtccatttttgtgaacgaggtggaggccgtggcagagggcatgccaacggaagtctcggaggttccggtgtggagggccaagtgcaagaatgtggctgcactgggtcgggagatgagcatcacggcagtacagatgtcggagctgcagtatgacatctgggtgcaaggcatgatgcgggatatggctcgaagccaggcagacaggctggccgcaattcaacccgcggaccttaccaactatttggagatggctacccagatggatatgcggactacgaggatgctgctggggctcctcaacatattgcgcatccagaatgcggcgctcaggtacgagtatcttctaatgcccacggagctcacaacatggccactgggtatggataccgtgggtgacttgctcatcgcgcaggagaatgctgcactgataggattaatgcagctagggccctcatctgatttcacgagcaggcatgtggtgaaagacatacctgtgaacttgctgctcgatggcgaggattgggagtttgagattcctgtgcaagctggcatgtccagcttcccttccagctggtctcgcgtccgtattcggcacctggagatgcactttgtgaaggaggccagcggtattggtggtgagattatccaccagcctaccacccagactgggaccgtttacatccttctgcagggttccactatcttccatgaccgcagaagagaccaggtgttgccttttcaggccgctgctccgctcaactaccattacgcgtaccgcctcgacaccggcgactccactctcacaaacgaaccctctgaacagtttgccaacaagttcatgcagatgacacccttcacccgttggaggcttcgtctgtctgcgtccgcaaaagagaatgcaggattagcctttcccacggctacagcacttgactccactacccagattgtcatcactttccatgttacggccatcagacaaattgactggcggcacgacgaagag

SEQ ID NO: 173 - DNA, 2601 bp, synthetic construct
  misc_feature 1..2601: note = PtIP-83 polypeptide variant encoding sequence
  source 1..2601: mol_type = other DNA
atggctctcgtggattacggcaagcttttcgaggatctgaaccagataagcatgggtgtactggatcgggtagagttttcagaggtgatggtgatccacaggatgtatgtgaggctagctgatctgaatgtggggcagctcgagggagccgagaaagtgaagcacttgtatattttttgcgacgttgtcgagctaccagtcgtggaatggcggtggccgccgcaaataccaggatcggtgacggtgatcatattgtgtcgtcttcttcaatggccaactgatgggaggcagtcggacaccgagctccacctgacattcatgaagttgcatgccatacaacgagaggaaaatcggtgggagataaccgcagcagatggcatgaactggggagtttacatacacgcagaggaagtacaggttggcgtgctgacaatgtcatggtcttcggtacttagagtttcggcacttcgctctgttataacctccggctttcgcgccgttagtgtgtttgaggtaccgggaagtgtaaggtccacccttggagctactttaaggcccgatcacgccttatatagtacaactatgcaagccacacccaacgcatcgcatattagtgcttttaaccttcgcatagtttccccgtcggcatatcgtgtttgtcctctccaaaatgacacagatacctacttaggtattccagcagacgtggcggcagttcttccagtagacgtggtgactgatcctaacatcttgctgggcatgcagacaacggtacacattgcggagctagtcaaggcatgtcatccgtcacccgatgttgtgagcgctgtaggggagcacctgaactggctcaacaaactcttactcccacttaaggaatcgactcagttgcaaggaagcgagtcgtacaaggagtgccttgcactcttgggtcgtgttcacgctgcgatgaagatggtgagaattggcttagtagtgccccagctgcaatacagaatgtacggtagcctcatcaaccaaatggcccaagtagcacaaaactacgaccgagaattcaagcaattcaaattattcatcatccaaaatcaaatccttggcagctatttgctgcagcagaacagggcatttgctgagagggagctgcagatggagagctttcatgctgctgtcatttctcaaagaagggaggagttggacaatacattcgcaaagatggaccgattgagcgggcaaatggaggcagagagtagtgcaatggagcaagccaaaaaggaaatggacgaaggattgaggcagttccagaataggcaagttgcgaacgccctctttgccgttcttagcgctgtagctcagattgggcttgcattccttacggctggtgcaacggctcctggagctgtggcgtcggcggggcaagctgtgagcatagcaggtcaggcggcgcaaggtctgcgaagggtggtggaaattctagagcagctggaggctgtgatggaggttgtggctgctgtgaaggacctcgtggattcattggaacaggtaggtcagattgtggacgcaccggtgatgccggaattgccctcagaggcggactggtccatttttgtgaacgaggtggaggccgtggcagagggcatgccaacggaagtctcggaggttccggtgtggagggccaagtgcaagaatgtggctgcactgggtcgggagatgagcatcacggcagtacagatgtcggagctgcagtatgacatctgggtgcaaggcatgatgcgggatatggctcgaagccaggcagacaggctggccgcaattcaacccgcggaccttaccaactatttggagatggctacccagatggatatgcggactacgaggatgctgctggggctcctcaacatattgcgcatccagaatgcggcgctcaggtacgagtatcttctaatgcccacggagctcacaacatggccactgggtatggataccgtgggtgacttgctcatcgcgcaggagaatgctgcactgataggattaatgcagctagggccctcatctgatttcacgagcaggcatgtggtgaaagacatacctgtgaacttgctgctcgatggcgaggattgggagtttgagattcctgtgcaagctggcatgtccagcttcccttccagctggtctcgcgtccgtattcggcacctggagatgcactttgtgaaggaggccagcggtattggtggtgagattatccaccagcctaccacccagactgggaccgtttacatccttctgcagggttccactatcttccatgaccgcagaagagaccaggtgttgccttttcaggccgctgctccgctcaactaccattacgcgtaccgcctcgacaccggcgactccactctcacaaacgaaccctctgaacagtttgccaacaagttcatgcagatgacacccttcacccgttggaggcttcgtctgtctgcgtccgcaaaagagaatgcaggattagcctttcccacggctacagcacttgactccactacccagattgtcatcactttccatgttacggccatcagacaaattgactggcggcacgacgaagag

SEQ ID NO: 174 - DNA, 2601 bp, synthetic construct
  misc_feature 1..2601: note = PtIP-83 polypeptide variant encoding sequence
  source 1..2601: mol_type = other DNA
atggctctcgtggattacggcaagcttttcgaggatctgaaccagataagcatgggtgtactggatcgggtagagttttcagaggtgatggtgatccacaggatgtatgtgaggctagctgatctgaatgtggggcagctcgagggagccgagaaagtgaagcacttgtatatttttagcgacattatcgagctaccagtcgtggaatggcggtggccgccgcaaataccaggatcggtgacggtgatcatattgtgtcgtcttcttcaatggccaactgatgggaggcagtcggacaccgagctccacctgacattcatgaagttgcatgccatacaacgagaggaaaatcggtgggagataaccgcagcagatggcatgaactggggagtttacatacacgcagaggaagtacaggttggcgtgctgacaatgtcatggtcttcggtacttagagtttcggcacttcgctctgttataacctccggctttcgcgccgttagtgtgtttgaggtaccgggaagtgtaaggtccacccttggagctactttaaggcccgatcacgccttatatagtacaactatgcaagccacacccaacgcatcgcatattagtgcttttaaccttcgcatagtttccccgtcggcatatcgtgtttgtcctctccaaaatgacacagatacctacttaggtattccagcagacgtggcggcagttcttccagtagacgtggtgactgatcctaacatcttgctgggcatgcagacaacggtacacattgcggagctagtcaaggcatgtcatccgtcacccgatgttgtgagcgctgtaggggagcacctgaactggctcaacaaactcttactcccacttaaggaatcgactcagttgcaaggaagcgagtcgtacaaggagtgccttgcactcttgggtcgtgttcacgctgcgatgaagatggtgagaattggcttagtagtgccccagctgcaatacagaatgtacggtagcctcatcaaccaaatggcccaagtagcacaaaactacgaccgagaattcaagcaattcaaattattcatcatccaaaatcaaatccttggcagctatttgctgcagcagaacagggcatttgctgagagggagctgcagatggagagctttcatgctgctgtcatttctcaaagaagggaggagttggacaatacattcgcaaagatggaccgattgagcgggcaaatggaggcagagagtagtgcaatggagcaagccaaaaaggaaatggacgaaggattgaggcagttccagaataggcaagttgcgaacgccctctttgccgttcttagcgctgtagctcagattgggcttgcattccttacggctggtgcaacggctcctggagctgtggcgtcggcggggcaagctgtgagcatagcaggtcaggcggcgcaaggtctgcgaagggtggtggaaattctagagcagctggaggctgtgatggaggttgtggctgctgtgaaggacctcgtggattcattggaacaggtaggtcagattgtggacgcaccggtgatgccggaattgccctcagaggcggactggtccatttttgtgaacgaggtggaggccgtggcagagggcatgccaacggaagtctcggaggttccggtgtggagggccaagtgcaagaatgtggctgcactgggtcgggagatgagcatcacggcagtacagatgtcggagctgcagtatgacatctgggtgcaaggcatgatgcgggatatggctcgaagccaggcagacaggctggccgcaattcaacccgcggaccttaccaactatttggagatggctacccagatggatatgcggactacgaggatgctgctggggctcctcaacatattgcgcatccagaatgcggcgctcaggtacgagtatcttctaatgcccacggagctcacaacatggccactgggtatggataccgtgggtgacttgctcatcgcgcaggagaatgctgcactgataggattaatgcagctagggccctcatctgatttcacgagcaggcatgtggtgaaagacatacctgtgaacttgctgctcgatggcgaggattgggagtttgagattcctgtgcaagctggcatgtccagcttcccttccagctggtctcgcgtccgtattcggcacctggagatgcactttgtgaaggaggccagcggtattggtggtgagattatccaccagcctaccacccagactgggaccgtttacatccttctgcagggttccactatcttccatgaccgcagaagagaccaggtgttgccttttcaggccgctgctccgctcaactaccattacgcgtaccgcctcgacaccggcgactccactctcacaaacgaaccctctgaacagtttgccaacaagttcatgcagatgacacccttcacccgttggaggcttcgtctgtctgcgtccgcaaaagagaatgcaggattagcctttcccacggctacagcacttgactccactacccagattgtcatcactttccatgttacggccatcagacaaattgactggcggcacgacgaagag

SEQ ID NO: 175 - DNA, 2601 bp, synthetic construct
  misc_feature 1..2601: note = PtIP-83 polypeptide variant encoding sequence
  source 1..2601: mol_type = other DNA
atggctctcgtggattacggcaagcttttcgaggatctgaaccagataagcatgggtgtactggatcgggtagagttttcagaggtgatggtgatccacaggatgtatgtgaggctagctgatctgaatgtggggcagctcgagggagccgagaaagtgaagcacttgtatatttttaccgacgttctcgagctaccagtcgtggaatggcggtggccgccgcaaataccaggatcggtgacggtgatcatattgtgtcgtcttcttcaatggccaactgatgggaggcagtcggacaccgagctccacctgacattcatgaagttgcatgccatacaacgagaggaaaatcggtgggagataaccgcagcagatggcatgaactggggagtttacatacacgcagaggaagtacaggttggcgtgctgacaatgtcatggtcttcggtacttagagtttcggcacttcgctctgttataacctccggctttcgcgccgttagtgtgtttgaggtaccgggaagtgtaaggtccacccttggagctactttaaggcccgatcacgccttatatagtacaactatgcaagccacacccaacgcatcgcatattagtgcttttaaccttcgcatagtttccccgtcggcatatcgtgtttgtcctctccaaaatgacacagatacctacttaggtattccagcagacgtggcggcagttcttccagtagacgtggtgactgatcctaacatcttgctgggcatgcagacaacggtacacattgcggagctagtcaaggcatgtcatccgtcacccgatgttgtgagcgctgtaggggagcacctgaactggctcaacaaactcttactcccacttaaggaatcgactcagttgcaaggaagcgagtcgtacaaggagtgccttgcactcttgggtcgtgttcacgctgcgatgaagatggtgagaattggcttagtagtgccccagctgcaatacagaatgtacggtagcctcatcaaccaaatggcccaagtagcacaaaactacgaccgagaattcaagcaattcaaattattcatcatccaaaatcaaatccttggcagctatttgctgcagcagaacagggcatttgctgagagggagctgcagatggagagctttcatgctgctgtcatttctcaaagaagggaggagttggacaatacattcgcaaagatggaccgattgagcgggcaaatggaggcagagagtagtgcaatggagcaagccaaaaaggaaatggacgaaggattgaggcagttccagaataggcaagttgcgaacgccctctttgccgttcttagcgctgtagctcagattgggcttgcattccttacggctggtgcaacggctcctggagctgtggcgtcggcggggcaagctgtgagcatagcaggtcaggcggcgcaaggtctgcgaagggtggtggaaattctagagcagctggaggctgtgatggaggttgtggctgctgtgaaggacctcgtggattcattggaacaggtaggtcagattgtggacgcaccggtgatgccggaattgccctcagaggcggactggtccatttttgtgaacgaggtggaggccgtggcagagggcatgccaacggaagtctcggaggttccggtgtggagggccaagtgcaagaatgtggctgcactgggtcgggagatgagcatcacggcagtacagatgtcggagctgcagtatgacatctgggtgcaaggcatgatgcgggatatggctcgaagccaggcagacaggctggccgcaattcaacccgcggaccttaccaactatttggagatggctacccagatggatatgcggactacgaggatgctgctggggctcctcaacatattgcgcatccagaatgcggcgctcaggtacgagtatcttctaatgcccacggagctcacaacatggccactgggtatggataccgtgggtgacttgctcatcgcgcaggagaatgctgcactgataggattaatgcagctagggccctcatctgatttcacgagcaggcatgtggtgaaagacatacctgtgaacttgctgctcgatggcgaggattgggagtttgagattcctgtgcaagctggcatgtccagcttcccttccagctggtctcgcgtccgtattcggcacctggagatgcactttgtgaaggaggccagcggtattggtggtgagattatccaccagcctaccacccagactgggaccgtttacatccttctgcagggttccactatcttccatgaccgcagaagagaccaggtgttgccttttcaggccgctgctccgctcaactaccattacgcgtaccgcctcgacaccggcgactccactctcacaaacgaaccctctgaacagtttgccaacaagttcatgcagatgacacccttcacccgttggaggcttcgtctgtctgcgtccgcaaaagagaatgcaggattagcctttcccacggctacagcacttgactccactacccagattgtcatcactttccatgttacggccatcagacaaattgactggcggcacgacgaagag

SEQ ID NO: 176 - DNA, 2601 bp, synthetic construct
  misc_feature 1..2601: note = PtIP-83 polypeptide variant encoding sequence
  source 1..2601: mol_type = other DNA
atggctctcgtggattacggcaagcttttcgaggatctgaaccagataagcatgggtgtactggatcgggtagagttttcagaggtgatggtgatccacaggatgtatgtgaggctagctgatctgaatgtggggcagctcgagggagccgagaaagtgaagcacttgtatgtttttgccgacattatcgtgctaccagtcgtggaatggcggtggccgccgcaaataccaggatcggtgacggtgatcatattgtgtcgtcttcttcaatggccaactgatgggaggcagtcggacaccgagctccacctgacattcatgaagttgcatgccatacaacgagaggaaaatcggtgggagataaccgcagcagatggcatgaactggggagtttacatacacgcagaggaagtacaggttggcgtgctgacaatgtcatggtcttcggtacttagagtttcggcacttcgctctgttataacctccggctttcgcgccgttagtgtgtttgaggtaccgggaagtgtaaggtccacccttggagctactttaaggcccgatcacgccttatatagtacaactatgcaagccacacccaacgcatcgcatattagtgcttttaaccttcgcatagtttccccgtcggcatatcgtgtttgtcctctccaaaatgacacagatacctacttaggtattccagcagacgtggcggcagttcttccagtagacgtggtgactgatcctaacatcttgctgggcatgcagacaacggtacacattgcggagctagtcaaggcatgtcatccgtcacccgatgttgtgagcgctgtaggggagcacctgaactggctcaacaaactcttactcccacttaaggaatcgactcagttgcaaggaagcgagtcgtacaaggagtgccttgcactcttgggtcgtgttcacgctgcgatgaagatggtgagaattggcttagtagtgccccagctgcaatacagaatgtacggtagcctcatcaaccaaatggcccaagtagcacaaaactacgaccgagaattcaagcaattcaaattattcatcatccaaaatcaaatccttggcagctatttgctgcagcagaacagggcatttgctgagagggagctgcagatggagagctttcatgctgctgtcatttctcaaagaagggaggagttggacaatacattcgcaaagatggaccgattgagcgggcaaatggaggcagagagtagtgcaatggagcaagccaaaaaggaaatggacgaaggattgaggcagttccagaataggcaagttgcgaacgccctctttgccgttcttagcgctgtagctcagattgggcttgcattccttacggctggtgcaacggctcctggagctgtggcgtcggcggggcaagctgtgagcatagcaggtcaggcggcgcaaggtctgcgaagggtggtggaaattctagagcagctggaggctgtgatggaggttgtggctgctgtgaaggacctcgtggattcattggaacaggtaggtcagattgtggacgcaccggtgatgccggaattgccctcagaggcggactggtccatttttgtgaacgaggtggaggccgtggcagagggcatgccaacggaagtctcggaggttccggtgtggagggccaagtgcaagaatgtggctgcactgggtcgggagatgagcatcacggcagtacagatgtcggagctgcagtatgacatctgggtgcaaggcatgatgcgggatatggctcgaagccaggcagacaggctggccgcaattcaacccgcggaccttaccaactatttggagatggctacccagatggatatgcggactacgaggatgctgctggggctcctcaacatattgcgcatccagaatgcggcgctcaggtacgagtatcttctaatgcccacggagctcacaacatggccactgggtatggataccgtgggtgacttgctcatcgcgcaggagaatgctgcactgataggattaatgcagctagggccctcatctgatttcacgagcaggcatgtggtgaaagacatacctgtgaacttgctgctcgatggcgaggattgggagtttgagattcctgtgcaagctggcatgtccagcttcccttccagctggtctcgcgtccgtattcggcacctggagatgcactttgtgaaggaggccagcggtattggtggtgagattatccaccagcctaccacccagactgggaccgtttacatccttctgcagggttccactatcttccatgaccgcagaagagaccaggtgttgccttttcaggccgctgctccgctcaactaccattacgcgtaccgcctcgacaccggcgactccactctcacaaacgaaccctctgaacagtttgccaacaagttcatgcagatgacacccttcacccgttggaggcttcgtctgtctgcgtccgcaaaagagaatgcaggattagcctttcccacggctacagcacttgactccactacccagattgtcatcactttccatgttacggccatcagacaaattgactggcggcacgacgaagag

SEQ ID NO: 177 - DNA, 2601 bp, synthetic construct
  misc_feature 1..2601: note = PtIP-83 polypeptide variant encoding sequence
  source 1..2601: mol_type = other DNA
atggctctcgtggattacggcaagcttttcgaggatctgaaccagataagcatgggtgtactggatcgggtagagttttcagaggtgatggtgatccacaggatgtatgtgaggctagctgatctgaatgtggggcagctcgagggagccgagaaagtgaagcacttgtatgtttttgccgacgttatcgagctaccagtcgtggaatggcggtggccgccgcaaataccaggatcggtgacggtgatcatattgtgtcgtcttcttcaatggccaactgatgggaggcagtcggacaccgagctccacctgacattcatgaagttgcatgccatacaacgagaggaaaatcggtgggagataaccgcagcagatggcatgaactggggagtttacatacacgcagaggaagtacaggttggcgtgctgacaatgtcatggtcttcggtacttagagtttcggcacttcgctctgttataacctccggctttcgcgccgttagtgtgtttgaggtaccgggaagtgtaaggtccacccttggagctactttaaggcccgatcacgccttatatagtacaactatgcaagccacacccaacgcatcgcatattagtgcttttaaccttcgcatagtttccccgtcggcatatcgtgtttgtcctctccaaaatgacacagatacctacttaggtattccagcagacgtggcggcagttcttccagtagacgtggtgactgatcctaacatcttgctgggcatgcagacaacggtacacattgcggagctagtcaaggcatgtcatccgtcacccgatgttgtgagcgctgtaggggagcacctgaactggctcaacaaactcttactcccacttaaggaatcgactcagttgcaaggaagcgagtcgtacaaggagtgccttgcactcttgggtcgtgttcacgctgcgatgaagatggtgagaattggcttagtagtgccccagctgcaatacagaatgtacggtagcctcatcaaccaaatggcccaagtagcacaaaactacgaccgagaattcaagcaattcaaattattcatcatccaaaatcaaatccttggcagctatttgctgcagcagaacagggcatttgctgagagggagctgcagatggagagctttcatgctgctgtcatttctcaaagaagggaggagttggacaatacattcgcaaagatggaccgattgagcgggcaaatggaggcagagagtagtgcaatggagcaagccaaaaaggaaatggacgaaggattgaggcagttccagaataggcaagttgcgaacgccctctttgccgttcttagcgctgtagctcagattgggcttgcattccttacggctggtgcaacggctcctggagctgtggcgtcggcggggcaagctgtgagcatagcaggtcaggcggcgcaaggtctgcgaagggtggtggaaattctagagcagctggaggctgtgatggaggttgtggctgctgtgaaggacctcgtggattcattggaacaggtaggtcagattgtggacgcaccggtgatgccggaattgccctcagaggcggactggtccatttttgtgaacgaggtggaggccgtggcagagggcatgccaacggaagtctcggaggttccggtgtggagggccaagtgcaagaatgtggctgcactgggtcgggagatgagcatcacggcagtacagatgtcggagctgcagtatgacatctgggtgcaaggcatgatgcgggatatggctcgaagccaggcagacaggctggccgcaattcaacccgcggaccttaccaactatttggagatggctacccagatggatatgcggactacgaggatgctgctggggctcctcaacatattgcgcatccagaatgcggcgctcaggtacgagtatcttctaatgcccacggagctcacaacatggccactgggtatggataccgtgggtgacttgctcatcgcgcaggagaatgctgcactgataggattaatgcagctagggccctcatctgatttcacgagcaggcatgtggtgaaagacatacctgtgaacttgctgctcgatggcgaggattgggagtttgagattcctgtgcaagctggcatgtccagcttcccttccagctggtctcgcgtccgtattcggcacctggagatgcactttgtgaaggaggccagcggtattggtggtgagattatccaccagcctaccacccagactgggaccgtttacatccttctgcagggttccactatcttccatgaccgcagaagagaccaggtgttgccttttcaggccgctgctccgctcaactaccattacgcgtaccgcctcgacaccggcgactccactctcacaaacgaaccctctgaacagtttgccaacaagttcatgcagatgacacccttcacccgttggaggcttcgtctgtctgcgtccgcaaaagagaatgcaggattagcctttcccacggctacagcacttgactccactacccagattgtcatcactttccatgttacggccatcagacaaattgactggcggcacgacgaagag

SEQ ID NO: 178 - DNA, 2601 bp, synthetic construct
  misc_feature 1..2601: note = PtIP-83 polypeptide variant encoding sequence
  source 1..2601: mol_type = other DNA
atggctctcgtggattacggcaagcttttcgaggatctgaaccagataagcatgggtgtactggatcgggtagagttttcagaggtgatggtgatccacaggatgtatgtgaggctagctgatctgaatgtggggcagctcgagggagccgagaaagtgaagcacttgtatgtttttggcgacgttatcgagctaccagtcgtggaatggcggtggccgccgcaaataccaggatcggtgacggtgatcatattgtgtcgtcttcttcaatggccaactgatgggaggcagtcggacaccgagctccacctgacattcatgaagttgcatgccatacaacgagaggaaaatcggtgggagataaccgcagcagatggcatgaactggggagtttacatacacgcagaggaagtacaggttggcgtgctgacaatgtcatggtcttcggtacttagagtttcggcacttcgctctgttataacctccggctttcgcgccgttagtgtgtttgaggtaccgggaagtgtaaggtccacccttggagctactttaaggcccgatcacgccttatatagtacaactatgcaagccacacccaacgcatcgcatattagtgcttttaaccttcgcatagtttccccgtcggcatatcgtgtttgtcctctccaaaatgacacagatacctacttaggtattccagcagacgtggcggcagttcttccagtagacgtggtgactgatcctaacatcttgctgggcatgcagacaacggtacacattgcggagctagtcaaggcatgtcatccgtcacccgatgttgtgagcgctgtaggggagcacctgaactggctcaacaaactcttactcccacttaaggaatcgactcagttgcaaggaagcgagtcgtacaaggagtgccttgcactcttgggtcgtgttcacgctgcgatgaagatggtgagaattggcttagtagtgccccagctgcaatacagaatgtacggtagcctcatcaaccaaatggcccaagtagcacaaaactacgaccgagaattcaagcaattcaaattattcatcatccaaaatcaaatccttggcagctatttgctgcagcagaacagggcatttgctgagagggagctgcagatggagagctttcatgctgctgtcatttctcaaagaagggaggagttggacaatacattcgcaaagatggaccgattgagcgggcaaatggaggcagagagtagtgcaatggagcaagccaaaaaggaaatggacgaaggattgaggcagttccagaataggcaagttgcgaacgccctctttgccgttcttagcgctgtagctcagattgggcttgcattccttacggctggtgcaacggctcctggagctgtggcgtcggcggggcaagctgtgagcatagcaggtcaggcggcgcaaggtctgcgaagggtggtggaaattctagagcagctggaggctgtgatggaggttgtggctgctgtgaaggacctcgtggattcattggaacaggtaggtcagattgtggacgcaccggtgatgccggaattgccctcagaggcggactggtccatttttgtgaacgaggtggaggccgtggcagagggcatgccaacggaagtctcggaggttccggtgtggagggccaagtgcaagaatgtggctgcactgggtcgggagatgagcatcacggcagtacagatgtcggagctgcagtatgacatctgggtgcaaggcatgatgcgggatatggctcgaagccaggcagacaggctggccgcaattcaacccgcggaccttaccaactatttggagatggctacccagatggatatgcggactacgaggatgctgctggggctcctcaacatattgcgcatccagaatgcggcgctcaggtacgagtatcttctaatgcccacggagctcacaacatggccactgggtatggataccgtgggtgacttgctcatcgcgcaggagaatgctgcactgataggattaatgcagctagggccctcatctgatttcacgagcaggcatgtggtgaaagacatacctgtgaacttgctgctcgatggcgaggattgggagtttgagattcctgtgcaagctggcatgtccagcttcccttccagctggtctcgcgtccgtattcggcacctggagatgcactttgtgaaggaggccagcggtattggtggtgagattatccaccagcctaccacccagactgggaccgtttacatccttctgcagggttccactatcttccatgaccgcagaagagaccaggtgttgccttttcaggccgctgctccgctcaactaccattacgcgtaccgcctcgacaccggcgactccactctcacaaacgaaccctctgaacagtttgccaacaagttcatgcagatgacacccttcacccgttggaggcttcgtctgtctgcgtccgcaaaagagaatgcaggattagcctttcccacggctacagcacttgactccactacccagattgtcatcactttccatgttacggccatcagacaaattgactggcggcacgacgaagag

SEQ ID NO: 179 - DNA, 2601 bp, synthetic construct
  misc_feature 1..2601: note = PtIP-83 polypeptide variant encoding sequence
  source 1..2601: mol_type = other DNA
atggctctcgtggattacggcaagcttttcgaggatctgaaccagataagcatgggtgtactggatcgggtagagttttcagaggtgatggtgatccacaggatgtatgtgaggctagctgatctgaatgtggggcagctcgagggagccgagaaagtgaagcacttgtatgttttttccgacgttatcgagctaccagtcgtggaatggcggtggccgccgcaaataccaggatcggtgacggtgatcatattgtgtcgtcttcttcaatggccaactgatgggaggcagtcggacaccgagctccacctgacattcatgaagttgcatgccatacaacgagaggaaaatcggtgggagataaccgcagcagatggcatgaactggggagtttacatacacgcagaggaagtacaggttggcgtgctgacaatgtcatggtcttcggtacttagagtttcggcacttcgctctgttataacctccggctttcgcgccgttagtgtgtttgaggtaccgggaagtgtaaggtccacccttggagctactttaaggcccgatcacgccttatatagtacaactatgcaagccacacccaacgcatcgcatattagtgcttttaaccttcgcatagtttccccgtcggcatatcgtgtttgtcctctccaaaatgacacagatacctacttaggtattccagcagacgtggcggcagttcttccagtagacgtggtgactgatcctaacatcttgctgggcatgcagacaacggtacacattgcggagctagtcaaggcatgtcatccgtcacccgatgttgtgagcgctgtaggggagcacctgaactggctcaacaaactcttactcccacttaaggaatcgactcagttgcaaggaagcgagtcgtacaaggagtgccttgcactcttgggtcgtgttcacgctgcgatgaagatggtgagaattggcttagtagtgccccagctgcaatacagaatgtacggtagcctcatcaaccaaatggcccaagtagcacaaaactacgaccgagaattcaagcaattcaaattattcatcatccaaaatcaaatccttggcagctatttgctgcagcagaacagggcatttgctgagagggagctgcagatggagagctttcatgctgctgtcatttctcaaagaagggaggagttggacaatacattcgcaaagatggaccgattgagcgggcaaatggaggcagagagtagtgcaatggagcaagccaaaaaggaaatggacgaaggattgaggcagttccagaataggcaagttgcgaacgccctctttgccgttcttagcgctgtagctcagattgggcttgcattccttacggctggtgcaacggctcctggagctgtggcgtcggcggggcaagctgtgagcatagcaggtcaggcggcgcaaggtctgcgaagggtggtggaaattctagagcagctggaggctgtgatggaggttgtggctgctgtgaaggacctcgtggattcattggaacaggtaggtcagattgtggacgcaccggtgatgccggaattgccctcagaggcggactggtccatttttgtgaacgaggtggaggccgtggcagagggcatgccaacggaagtctcggaggttccggtgtggagggccaagtgcaagaatgtggctgcactgggtcgggagatgagcatcacggcagtacagatgtcggagctgcagtatgacatctgggtgcaaggcatgatgcgggatatggctcgaagccaggcagacaggctggccgcaattcaacccgcggaccttaccaactatttggagatggctacccagatggatatgcggactacgaggatgctgctggggctcctcaacatattgcgcatccagaatgcggcgctcaggtacgagtatcttctaatgcccacggagctcacaacatggccactgggtatggataccgtgggtgacttgctcatcgcgcaggagaatgctgcactgataggattaatgcagctagggccctcatctgatttcacgagcaggcatgtggtgaaagacatacctgtgaacttgctgctcgatggcgaggattgggagtttgagattcctgtgcaagctggcatgtccagcttcccttccagctggtctcgcgtccgtattcggcacctggagatgcactttgtgaaggaggccagcggtattggtggtgagattatccaccagcctaccacccagactgggaccgtttacatccttctgcagggttccactatcttccatgaccgcagaagagaccaggtgttgccttttcaggccgctgctccgctcaactaccattacgcgtaccgcctcgacaccggcgactccactctcacaaacgaaccctctgaacagtttgccaacaagttcatgcagatgacacccttcacccgttggaggcttcgtctgtctgcgtccgcaaaagagaatgcaggattagcctttcccacggctacagcacttgactccactacccagattgtcatcactttccatgttacggccatcagacaaattgactggcggcacgacgaagag

SEQ ID NO: 180 - DNA, 2601 bp, synthetic construct
  misc_feature 1..2601: note = PtIP-83 polypeptide variant encoding sequence
  source 1..2601: mol_type = other DNA
atggctctcgtggattacggcaagcttttcgaggatctgaaccagataagcatgggtgtactggatcgggtagagttttcagaggtgatggtgatccacaggatgtatgtgaggctagctgatctgaatgtggggcagctcgagggagccgagaaagtgaagcacttgtatgtttttagcgacgttctcgtgctaccagtcgtggaatggcggtggccgccgcaaataccaggatcggtgacggtgatcatattgtgtcgtcttcttcaatggccaactgatgggaggcagtcggacaccgagctccacctgacattcatgaagttgcatgccatacaacgagaggaaaatcggtgggagataaccgcagcagatggcatgaactggggagtttacatacacgcagaggaagtacaggttggcgtgctgacaatgtcatggtcttcggtacttagagtttcggcacttcgctctgttataacctccggctttcgcgccgttagtgtgtttgaggtaccgggaagtgtaaggtccacccttggagctactttaaggcccgatcacgccttatatagtacaactatgcaagccacacccaacgcatcgcatattagtgcttttaaccttcgcatagtttccccgtcggcatatcgtgtttgtcctctccaaaatgacacagatacctacttaggtattccagcagacgtggcggcagttcttccagtagacgtggtgactgatcctaacatcttgctgggcatgcagacaacggtacacattgcggagctagtcaaggcatgtcatccgtcacccgatgttgtgagcgctgtaggggagcacctgaactggctcaacaaactcttactcccacttaaggaatcgactcagttgcaaggaagcgagtcgtacaaggagtgccttgcactcttgggtcgtgttcacgctgcgatgaagatggtgagaattggcttagtagtgccccagctgcaatacagaatgtacggtagcctcatcaaccaaatggcccaagtagcacaaaactacgaccgagaattcaagcaattcaaattattcatcatccaaaatcaaatccttggcagctatttgctgcagcagaacagggcatttgctgagagggagctgcagatggagagctttcatgctgctgtcatttctcaaagaagggaggagttggacaatacattcgcaaagatggaccgattgagcgggcaaatggaggcagagagtagtgcaatggagcaagccaaaaaggaaatggacgaaggattgaggcagttccagaataggcaagttgcgaacgccctctttgccgttcttagcgctgtagctcagattgggcttgcattccttacggctggtgcaacggctcctggagctgtggcgtcggcggggcaagctgtgagcatagcaggtcaggcggcgcaaggtctgcgaagggtggtggaaattctagagcagctggaggctgtgatggaggttgtggctgctgtgaaggacctcgtggattcattggaacaggtaggtcagattgtggacgcaccggtgatgccggaattgccctcagaggcggactggtccatttttgtgaacgaggtggaggccgtggcagagggcatgccaacggaagtctcggaggttccggtgtggagggccaagtgcaagaatgtggctgcactgggtcgggagatgagcatcacggcagtacagatgtcggagctgcagtatgacatctgggtgcaaggcatgatgcgggatatggctcgaagccaggcagacaggctggccgcaattcaacccgcggaccttaccaactatttggagatggctacccagatggatatgcggactacgaggatgctgctggggctcctcaacatattgcgcatccagaatgcggcgctcaggtacgagtatcttctaatgcccacggagctcacaacatggccactgggtatggataccgtgggtgacttgctcatcgcgcaggagaatgctgcactgataggattaatgcagctagggccctcatctgatttcacgagcaggcatgtggtgaaagacatacctgtgaacttgctgctcgatggcgaggattgggagtttgagattcctgtgcaagctggcatgtccagcttcccttccagctggtctcgcgtccgtattcggcacctggagatgcactttgtgaaggaggccagcggtattggtggtgagattatccaccagcctaccacccagactgggaccgtttacatccttctgcagggttccactatcttccatgaccgcagaagagaccaggtgttgccttttcaggccgctgctccgctcaactaccattacgcgtaccgcctcgacaccggcgactccactctcacaaacgaaccctctgaacagtttgccaacaagttcatgcagatgacacccttcacccgttggaggcttcgtctgtctgcgtccgcaaaagagaatgcaggattagcctttcccacggctacagcacttgactccactacccagattgtcatcactttccatgttacggccatcagacaaattgactggcggcacgacgaagag

SEQ ID NO: 181 - DNA, 2601 bp, synthetic construct
  misc_feature 1..2601: note = PtIP-83 polypeptide variant encoding sequence
  source 1..2601: mol_type = other DNA
atggctctcgtggattacggcaagcttttcgaggatctgaaccagataagcatgggtgtactggatcgggtagagttttcagaggtgatggtgatccacaggatgtatgtgaggctagctgatctgaatgtggggcagctcgagggagccgagaaagtgaagcagctcatcatcttttccgacatcatcgagctcccagtcgtggaatggcggtggccgccgcaaataccaggatcggtgacggtgatcatattgtgtcgtcttcttcaatggccaactgatgggaggcagtcggacaccgagctccacctgacattcatgaagttgcatgccatacaacgagaggaaaatcggtgggagataaccgcagcagatggcatgaactggggagtttacatacacgcagaggaagtacaggttggcgtgctgacaatgtcatggtcttcggtacttagagtttcggcacttcgctctgttataacctccggctttcgcgccgttagtgtgtttgaggtaccgggaagtgtaaggtccacccttggagctactttaaggcccgatcacgccttatatagtacaactatgcaagccacacccaacgcatcgcatattagtgcttttaaccttcgcatagtttccccgtcggcatatcgtgtttgtcctctccaaaatgacacagatacctacttaggtattccagcagacgtggcggcagttcttccagtagacgtggtgactgatcctaacatcttgctgggcatgcagacaacggtacacattgcggagctagtcaaggcatgtcatccgtcacccgatgttgtgagcgctgtaggggagcacctgaactggctcaacaaactcttactcccacttaaggaatcgactcagttgcaaggaagcgagtcgtacaaggagtgccttgcactcttgggtcgtgttcacgctgcgatgaagatggtgagaattggcttagtagtgccccagctgcaatacagaatgtacggtagcctcatcaaccaaatggcccaagtagcacaaaactacgaccgagaattcaagcaattcaaattattcatcatccaaaatcaaatccttggcagctatttgctgcagcagaacagggcatttgctgagagggagctgcagatggagagctttcatgctgctgtcatttctcaaagaagggaggagttggacaatacattcgcaaagatggaccgattgagcgggcaaatggaggcagagagtagtgcaatggagcaagccaaaaaggaaatggacgaaggattgaggcagttccagaataggcaagttgcgaacgccctctttgccgttcttagcgctgtagctcagattgggcttgcattccttacggctggtgcaacggctcctggagctgtggcgtcggcggggcaagctgtgagcatagcaggtcaggcggcgcaaggtctgcgaagggtggtggaaattctagagcagctggaggctgtgatggaggttgtggctgctgtgaaggacctcgtggattcattggaacaggtaggtcagattgtggacgcaccggtgatgccggaattgccctcagaggcggactggtccatttttgtgaacgaggtggaggccgtggcagagggcatgccaacggaagtctcggaggttccggtgtggagggccaagtgcaagaatgtggctgcactgggtcgggagatgagcatcacggcagtacagatgtcggagctgcagtatgacatctgggtgcaaggcatgatgcgggatatggctcgaagccaggcagacaggctggccgcaattcaacccgcggaccttaccaactatttggagatggctacccagatggatatgcggactacgaggatgctgctggggctcctcaacatattgcgcatccagaatgcggcgctcaggtacgagtatcttctaatgcccacggagctcacaacatggccactgggtatggataccgtgggtgacttgctcatcgcgcaggagaatgctgcactgataggattaatgcagctagggccctcatctgatttcacgagcaggcatgtggtgaaagacatacctgtgaacttgctgctcgatggcgaggattgggagtttgagattcctgtgcaagctggcatgtccagcttcccttccagctggtctcgcgtccgtattcggcacctggagatgcactttgtgaaggaggccagcggtattggtggtgagattatccaccagcctaccacccagactgggaccgtttacatccttctgcagggttccactatcttccatgaccgcagaagagaccaggtgttgccttttcaggccgctgctccgctcaactaccattacgcgtaccgcctcgacaccggcgactccactctcacaaacgaaccctctgaacagtttgccaacaagttcatgcagatgacacccttcacccgttggaggcttcgtctgtctgcgtccgcaaaagagaatgcaggattagcctttcccacggctacagcacttgactccactacccagattgtcatcactttccatgttacggccatcagacaaattgactggcggcacgacgaagag

SEQ ID NO: 182 - DNA, 2601 bp, synthetic construct
  misc_feature 1..2601: note = PtIP-83 polypeptide variant encoding sequence
  source 1..2601: mol_type = other DNA
atggctctcgtggattacggcaagcttttcgaggatctgaaccagataagcatgggtgtactggatcgggtagagttttcagaggtgatggtgatccacaggatgtatgtgaggctagctgatctgaatgtggggcagctcgagggagccgagaaagtgaagcagttgtatattttttgcgacattatcgagctaccagtcgtggaatggcggtggccgccgcaaataccaggatcggtgacggtgatcatattgtgtcgtcttcttcaatggccaactgatgggaggcagtcggacaccgagctccacctgacattcatgaagttgcatgccatacaacgagaggaaaatcggtgggagataaccgcagcagatggcatgaactggggagtttacatacacgcagaggaagtacaggttggcgtgctgacaatgtcatggtcttcggtacttagagtttcggcacttcgctctgttataacctccggctttcgcgccgttagtgtgtttgaggtaccgggaagtgtaaggtccacccttggagctactttaaggcccgatcacgccttatatagtacaactatgcaagccacacccaacgcatcgcatattagtgcttttaaccttcgcatagtttccccgtcggcatatcgtgtttgtcctctccaaaatgacacagatacctacttaggtattccagcagacgtggcggcagttcttccagtagacgtggtgactgatcctaacatcttgctgggcatgcagacaacggtacacattgcggagctagtcaaggcatgtcatccgtcacccgatgttgtgagcgctgtaggggagcacctgaactggctcaacaaactcttactcccacttaaggaatcgactcagttgcaaggaagcgagtcgtacaaggagtgccttgcactcttgggtcgtgttcacgctgcgatgaagatggtgagaattggcttagtagtgccccagctgcaatacagaatgtacggtagcctcatcaaccaaatggcccaagtagcacaaaactacgaccgagaattcaagcaattcaaattattcatcatccaaaatcaaatccttggcagctatttgctgcagcagaacagggcatttgctgagagggagctgcagatggagagctttcatgctgctgtcatttctcaaagaagggaggagttggacaatacattcgcaaagatggaccgattgagcgggcaaatggaggcagagagtagtgcaatggagcaagccaaaaaggaaatggacgaaggattgaggcagttccagaataggcaagttgcgaacgccctctttgccgttcttagcgctgtagctcagattgggcttgcattccttacggctggtgcaacggctcctggagctgtggcgtcggcggggcaagctgtgagcatagcaggtcaggcggcgcaaggtctgcgaagggtggtggaaattctagagcagctggaggctgtgatggaggttgtggctgctgtgaaggacctcgtggattcattggaacaggtaggtcagattgtggacgcaccggtgatgccggaattgccctcagaggcggactggtccatttttgtgaacgaggtggaggccgtggcagagggcatgccaacggaagtctcggaggttccggtgtggagggccaagtgcaagaatgtggctgcactgggtcgggagatgagcatcacggcagtacagatgtcggagctgcagtatgacatctgggtgcaaggcatgatgcgggatatggctcgaagccaggcagacaggctggccgcaattcaacccgcggaccttaccaactatttggagatggctacccagatggatatgcggactacgaggatgctgctggggctcctcaacatattgcgcatccagaatgcggcgctcaggtacgagtatcttctaatgcccacggagctcacaacatggccactgggtatggataccgtgggtgacttgctcatcgcgcaggagaatgctgcactgataggattaatgcagctagggccctcatctgatttcacgagcaggcatgtggtgaaagacatacctgtgaacttgctgctcgatggcgaggattgggagtttgagattcctgtgcaagctggcatgtccagcttcccttccagctggtctcgcgtccgtattcggcacctggagatgcactttgtgaaggaggccagcggtattggtggtgagattatccaccagcctaccacccagactgggaccgtttacatccttctgcagggttccactatcttccatgaccgcagaagagaccaggtgttgccttttcaggccgctgctccgctcaactaccattacgcgtaccgcctcgacaccggcgactccactctcacaaacgaaccctctgaacagtttgccaacaagttcatgcagatgacacccttcacccgttggaggcttcgtctgtctgcgtccgcaaaagagaatgcaggattagcctttcccacggctacagcacttgactccactacccagattgtcatcactttccatgttacggccatcagacaaattgactggcggcacgacgaagag

SEQ ID NO: 183 - DNA, 2601 bp, synthetic construct
  misc_feature 1..2601: note = PtIP-83 polypeptide variant encoding sequence
  source 1..2601: mol_type = other DNA
atggctctcgtggattacggcaagcttttcgaggatctgaaccagataagcatgggtgtactggatcgggtagagttttcagaggtgatggtgatccacaggatgtatgtgaggctagctgatctgaatgtggggcagctcgagggagccgagaaagtgaagcagttgtatattttttgcgacgttctcgagctaccagtcgtggaatggcggtggccgccgcaaataccaggatcggtgacggtgatcatattgtgtcgtcttcttcaatggccaactgatgggaggcagtcggacaccgagctccacctgacattcatgaagttgcatgccatacaacgagaggaaaatcggtgggagataaccgcagcagatggcatgaactggggagtttacatacacgcagaggaagtacaggttggcgtgctgacaatgtcatggtcttcggtacttagagtttcggcacttcgctctgttataacctccggctttcgcgccgttagtgtgtttgaggtaccgggaagtgtaaggtccacccttggagctactttaaggcccgatcacgccttatatagtacaactatgcaagccacacccaacgcatcgcatattagtgcttttaaccttcgcatagtttccccgtcggcatatcgtgtttgtcctctccaaaatgacacagatacctacttaggtattccagcagacgtggcggcagttcttccagtagacgtggtgactgatcctaacatcttgctgggcatgcagacaacggtacacattgcggagctagtcaaggcatgtcatccgtcacccgatgttgtgagcgctgtaggggagcacctgaactggctcaacaaactcttactcccacttaaggaatcgactcagttgcaaggaagcgagtcgtacaaggagtgccttgcactcttgggtcgtgttcacgctgcgatgaagatggtgagaattggcttagtagtgccccagctgcaatacagaatgtacggtagcctcatcaaccaaatggcccaagtagcacaaaactacgaccgagaattcaagcaattcaaattattcatcatccaaaatcaaatccttggcagctatttgctgcagcagaacagggcatttgctgagagggagctgcagatggagagctttcatgctgctgtcatttctcaaagaagggaggagttggacaatacattcgcaaagatggaccgattgagcgggcaaatggaggcagagagtagtgcaatggagcaagccaaaaaggaaatggacgaaggattgaggcagttccagaataggcaagttgcgaacgccctctttgccgttcttagcgctgtagctcagattgggcttgcattccttacggctggtgcaacggctcctggagctgtggcgtcggcggggcaagctgtgagcatagcaggtcaggcggcgcaaggtctgcgaagggtggtggaaattctagagcagctggaggctgtgatggaggttgtggctgctgtgaaggacctcgtggattcattggaacaggtaggtcagattgtggacgcaccggtgatgccggaattgccctcagaggcggactggtccatttttgtgaacgaggtggaggccgtggcagagggcatgccaacggaagtctcggaggttccggtgtggagggccaagtgcaagaatgtggctgcactgggtcgggagatgagcatcacggcagtacagatgtcggagctgcagtatgacatctgggtgcaaggcatgatgcgggatatggctcgaagccaggcagacaggctggccgcaattcaacccgcggaccttaccaactatttggagatggctacccagatggatatgcggactacgaggatgctgctggggctcctcaacatattgcgcatccagaatgcggcgctcaggtacgagtatcttctaatgcccacggagctcacaacatggccactgggtatggataccgtgggtgacttgctcatcgcgcaggagaatgctgcactgataggattaatgcagctagggccctcatctgatttcacgagcaggcatgtggtgaaagacatacctgtgaacttgctgctcgatggcgaggattgggagtttgagattcctgtgcaagctggcatgtccagcttcccttccagctggtctcgcgtccgtattcggcacctggagatgcactttgtgaaggaggccagcggtattggtggtgagattatccaccagcctaccacccagactgggaccgtttacatccttctgcagggttccactatcttccatgaccgcagaagagaccaggtgttgccttttcaggccgctgctccgctcaactaccattacgcgtaccgcctcgacaccggcgactccactctcacaaacgaaccctctgaacagtttgccaacaagttcatgcagatgacacccttcacccgttggaggcttcgtctgtctgcgtccgcaaaagagaatgcaggattagcctttcccacggctacagcacttgactccactacccagattgtcatcactttccatgttacggccatcagacaaattgactggcggcacgacgaagag

SEQ ID NO: 184 - DNA, 2601 bp, synthetic construct
  misc_feature 1..2601: note = PtIP-83 polypeptide variant encoding sequence
  source 1..2601: mol_type = other DNA
atggctctcgtggattacggcaagcttttcgaggatctgaaccagataagcatgggtgtactggatcgggtagagttttcagaggtgatggtgatccacaggatgtatgtgaggctagctgatctgaatgtggggcagctcgagggagccgagaaagtgaagcagttgtatatttttggcgacgttatcgagctaccagtcgtggaatggcggtggccgccgcaaataccaggatcggtgacggtgatcatattgtgtcgtcttcttcaatggccaactgatgggaggcagtcggacaccgagctccacctgacattcatgaagttgcatgccatacaacgagaggaaaatcggtgggagataaccgcagcagatggcatgaactggggagtttacatacacgcagaggaagtacaggttggcgtgctgacaatgtcatggtcttcggtacttagagtttcggcacttcgctctgttataacctccggctttcgcgccgttagtgtgtttgaggtaccgggaagtgtaaggtccacccttggagctactttaaggcccgatcacgccttatatagtacaactatgcaagccacacccaacgcatcgcatattagtgcttttaaccttcgcatagtttccccgtcggcatatcgtgtttgtcctctccaaaatgacacagatacctacttaggtattccagcagacgtggcggcagttcttccagtagacgtggtgactgatcctaacatcttgctgggcatgcagacaacggtacacattgcggagctagtcaaggcatgtcatccgtcacccgatgttgtgagcgctgtaggggagcacctgaactggctcaacaaactcttactcccacttaaggaatcgactcagttgcaaggaagcgagtcgtacaaggagtgccttgcactcttgggtcgtgttcacgctgcgatgaagatggtgagaattggcttagtagtgccccagctgcaatacagaatgtacggtagcctcatcaaccaaatggcccaagtagcacaaaactacgaccgagaattcaagcaattcaaattattcatcatccaaaatcaaatccttggcagctatttgctgcagcagaacagggcatttgctgagagggagctgcagatggagagctttcatgctgctgtcatttctcaaagaagggaggagttggacaatacattcgcaaagatggaccgattgagcgggcaaatggaggcagagagtagtgcaatggagcaagccaaaaaggaaatggacgaaggattgaggcagttccagaataggcaagttgcgaacgccctctttgccgttcttagcgctgtagctcagattgggcttgcattccttacggctggtgcaacggctcctggagctgtggcgtcggcggggcaagctgtgagcatagcaggtcaggcggcgcaaggtctgcgaagggtggtggaaattctagagcagctggaggctgtgatggaggttgtggctgctgtgaaggacctcgtggattcattggaacaggtaggtcagattgtggacgcaccggtgatgccggaattgccctcagaggcggactggtccatttttgtgaacgaggtggaggccgtggcagagggcatgccaacggaagtctcggaggttccggtgtggagggccaagtgcaagaatgtggctgcactgggtcgggagatgagcatcacggcagtacagatgtcggagctgcagtatgacatctgggtgcaaggcatgatgcgggatatggctcgaagccaggcagacaggctggccgcaattcaacccgcggaccttaccaactatttggagatggctacccagatggatatgcggactacgaggatgctgctggggctcctcaacatattgcgcatccagaatgcggcgctcaggtacgagtatcttctaatgcccacggagctcacaacatggccactgggtatggataccgtgggtgacttgctcatcgcgcaggagaatgctgcactgataggattaatgcagctagggccctcatctgatttcacgagcaggcatgtggtgaaagacatacctgtgaacttgctgctcgatggcgaggattgggagtttgagattcctgtgcaagctggcatgtccagcttcccttccagctggtctcgcgtccgtattcggcacctggagatgcactttgtgaaggaggccagcggtattggtggtgagattatccaccagcctaccacccagactgggaccgtttacatccttctgcagggttccactatcttccatgaccgcagaagagaccaggtgttgccttttcaggccgctgctccgctcaactaccattacgcgtaccgcctcgacaccggcgactccactctcacaaacgaaccctctgaacagtttgccaacaagttcatgcagatgacacccttcacccgttggaggcttcgtctgtctgcgtccgcaaaagagaatgcaggattagcctttcccacggctacagcacttgactccactacccagattgtcatcactttccatgttacggccatcagacaaattgactggcggcacgacgaagag

SEQ ID NO: 185 - DNA, 2601 bp, synthetic construct
  misc_feature 1..2601: note = PtIP-83 polypeptide variant encoding sequence
  source 1..2601: mol_type = other DNA
atggctctcgtggattacggcaagcttttcgaggatctgaaccagataagcatgggtgtactggatcggatagagttttcagaggtgatggtgatccacaggatgtatgtgaggctagctgatctgaatgtggggcagctcgagggagccgagaaagtgaagcagttgtatatttttagcgacattatcgagctaccagtcgtggaatggcggtggccgccgcaaataccaggatcggtgacggtgatcatattgtgtcgtcttcttcaatggccaactgatgggaggcagtcggacaccgagctccacctgacattcatgaagttgcatgccatacaacgagaggaaaatcggtgggagataaccgcagcagatggcatgaactggggagtttacatacacgcagaggaagtacaggttggcgtgctgacaatgtcatggtcttcggtacttagagtttcggcacttcgctctgttataacctccggctttcgcgccgttagtgtgtttgaggtaccgggaagtgtaaggtccacccttggagctactttaaggcccgatcacgccttatatagtacaactatgcaagccacacccaacgcatcgcatattagtgcttttaaccttcgcatagtttccccgtcggcatatcgtgtttgtcctctccaaaatgacacagatacctacttaggtattccagcagacgtggcggcagttcttccagtagacgtggtgactgatcctaacatcttgctgggcatgcagacaacggtacacattgcggagctagtcaaggcatgtcatccgtcacccgatgttgtgagcgctgtaggggagcacctgaactggctcaacaaactcttactcccacttaaggaatcgactcagttgcaaggaagcgagtcgtacaaggagtgccttgcactcttgggtcgtgttcacgctgcgatgaagatggtgagaattggcttagtagtgccccagctgcaatacagaatgtacggtagcctcatcaaccaaatggcccaagtagcacaaaactacgaccgagaattcaagcaattcaaattattcatcatccaaaatcaaatccttggcagctatttgctgcagcagaacagggcatttgctgagagggagctgcagatggagagctttcatgctgctgtcatttctcaaagaagggaggagttggacaatacattcgcaaagatggaccgattgagcgggcaaatggaggcagagagtagtgcaatggagcaagccaaaaaggaaatggacgaaggattgaggcagttccagaataggcaagttgcgaacgccctctttgccgttcttagcgctgtagctcagattgggcttgcattccttacggctggtgcaacggctcctggagctgtggcgtcggcggggcaagctgtgagcatagcaggtcaggcggcgcaaggtctgcgaagggtggtggaaattctagagcagctggaggctgtgatggaggttgtggctgctgtgaaggacctcgtggattcattggaacaggtaggtcagattgtggacgcaccggtgatgccggaattgccctcagaggcggactggtccatttttgtgaacgaggtggaggccgtggcagagggcatgccaacggaagtctcggaggttccggtgtggagggccaagtgcaagaatgtggctgcactgggtcgggagatgagcatcacggcagtacagatgtcggagctgcagtatgacatctgggtgcaaggcatgatgcgggatatggctcgaagccaggcagacaggctggccgcaattcaacccgcggaccttaccaactatttggagatggctacccagatggatatgcggactacgaggatgctgctggggctcctcaacatattgcgcatccagaatgcggcgctcaggtacgagtatcttctaatgcccacggagctcacaacatggccactgggtatggataccgtgggtgacttgctcatcgcgcaggagaatgctgcactgataggattaatgcagctagggccctcatctgatttcacgagcaggcatgtggtgaaagacatacctgtgaacttgctgctcgatggcgaggattgggagtttgagattcctgtgcaagctggcatgtccagcttcccttccagctggtctcgcgtccgtattcggcacctggagatgcactttgtgaaggaggccagcggtattggtggtgagattatccaccagcctaccacccagactgggaccgtttacatccttctgcagggttccactatcttccatgaccgcagaagagaccaggtgttgccttttcaggccgctgctccgctcaactaccattacgcgtaccgcctcgacaccggcgactccactctcacaaacgaaccctctgaacagtttgccaacaagttcatgcagatgacacccttcacccgttggaggcttcgtctgtctgcgtccgcaaaagagaatgcaggattagcctttcccacggctacagcacttgactccactacccagattgtcatcactttccatgttacggccatcagacaaattgactggcggcacgacgaagag

SEQ ID NO: 186 - DNA, 2601 bp, synthetic construct
  misc_feature 1..2601: note = PtIP-83 polypeptide variant encoding sequence
  source 1..2601: mol_type = other DNA
atggctctcgtggattacggcaagcttttcgaggatctgaaccagataagcatgggtgtactggatcgggtagagttttcagaggtgatggtgatccacaggatgtatgtgaggctagctgatctgaatgtggggcagctcgagggagccgagaaagtgaagcagttgtatgttttttgcgacattctcgagctaccagtcgtggaatggcggtggccgccgcaaataccaggatcggtgacggtgatcatattgtgtcgtcttcttcaatggccaactgatgggaggcagtcggacaccgagctccacctgacattcatgaagttgcatgccatacaacgagaggaaaatcggtgggagataaccgcagcagatggcatgaactggggagtttacatacacgcagaggaagtacaggttggcgtgctgacaatgtcatggtcttcggtacttagagtttcggcacttcgctctgttataacctccggctttcgcgccgttagtgtgtttgaggtaccgggaagtgtaaggtccacccttggagctactttaaggcccgatcacgccttatatagtacaactatgcaagccacacccaacgcatcgcatattagtgcttttaaccttcgcatagtttccccgtcggcatatcgtgtttgtcctctccaaaatgacacagatacctacttaggtattccagcagacgtggcggcagttcttccagtagacgtggtgactgatcctaacatcttgctgggcatgcagacaacggtacacattgcggagctagtcaaggcatgtcatccgtcacccgatgttgtgagcgctgtaggggagcacctgaactggctcaacaaactcttactcccacttaaggaatcgactcagttgcaaggaagcgagtcgtacaaggagtgccttgcactcttgggtcgtgttcacgctgcgatgaagatggtgagaattggcttagtagtgccccagctgcaatacagaatgtacggtagcctcatcaaccaaatggcccaagtagcacaaaactacgaccgagaattcaagcaattcaaattattcatcatccaaaatcaaatccttggcagctatttgctgcagcagaacagggcatttgctgagagggagctgcagatggagagctttcatgctgctgtcatttctcaaagaagggaggagttggacaatacattcgcaaagatggaccgattgagcgggcaaatggaggcagagagtagtgcaatggagcaagccaaaaaggaaatggacgaaggattgaggcagttccagaataggcaagttgcgaacgccctctttgccgttcttagcgctgtagctcagattgggcttgcattccttacggctggtgcaacggctcctggagctgtggcgtcggcggggcaagctgtgagcatagcaggtcaggcggcgcaaggtctgcgaagggtggtggaaattctagagcagctggaggctgtgatggaggttgtggctgctgtgaaggacctcgtggattcattggaacaggtaggtcagattgtggacgcaccggtgatgccggaattgccctcagaggcggactggtccatttttgtgaacgaggtggaggccgtggcagagggcatgccaacggaagtctcggaggttccggtgtggagggccaagtgcaagaatgtggctgcactgggtcgggagatgagcatcacggcagtacagatgtcggagctgcagtatgacatctgggtgcaaggcatgatgcgggatatggctcgaagccaggcagacaggctggccgcaattcaacccgcggaccttaccaactatttggagatggctacccagatggatatgcggactacgaggatgctgctggggctcctcaacatattgcgcatccagaatgcggcgctcaggtacgagtatcttctaatgcccacggagctcacaacatggccactgggtatggataccgtgggtgacttgctcatcgcgcaggagaatgctgcactgataggattaatgcagctagggccctcatctgatttcacgagcaggcatgtggtgaaagacatacctgtgaacttgctgctcgatggcgaggattgggagtttgagattcctgtgcaagctggcatgtccagcttcccttccagctggtctcgcgtccgtattcggcacctggagatgcactttgtgaaggaggccagcggtattggtggtgagattatccaccagcctaccacccagactgggaccgtttacatccttctgcagggttccactatcttccatgaccgcagaagagaccaggtgttgccttttcaggccgctgctccgctcaactaccattacgcgtaccgcctcgacaccggcgactccactctcacaaacgaaccctctgaacagtttgccaacaagttcatgcagatgacacccttcacccgttggaggcttcgtctgtctgcgtccgcaaaagagaatgcaggattagcctttcccacggctacagcacttgactccactacccagattgtcatcactttccatgttacggccatcagacaaattgactggcggcacgacgaagag

SEQ ID NO: 187 - DNA, 2601 bp, synthetic construct
  misc_feature 1..2601: note = PtIP-83 polypeptide variant encoding sequence
  source 1..2601: mol_type = other DNA
atggctctcgtggattacggcaagcttttcgaggatctgaaccagataagcatgggtgtactggatcgggtagagttttcagaggtgatggtgatccacaggatgtatgtgaggctagctgatctgaatgtggggcagctcgagggagccgagaaagtgaagcagttgtatgtttttagcgacattctcgagctaccagtcgtggaatggcggtggccgccgcaaataccaggatcggtgacggtgatcatattgtgtcgtcttcttcaatggccaactgatgggaggcagtcggacaccgagctccacctgacattcatgaagttgcatgccatacaacgagaggaaaatcggtgggagataaccgcagcagatggcatgaactggggagtttacatacacgcagaggaagtacaggttggcgtgctgacaatgtcatggtcttcggtacttagagtttcggcacttcgctctgttataacctccggctttcgcgccgttagtgtgtttgaggtaccgggaagtgtaaggtccacccttggagctactttaaggcccgatcacgccttatatagtacaactatgcaagccacacccaacgcatcgcatattagtgcttttaaccttcgcatagtttccccgtcggcatatcgtgtttgtcctctccaaaatgacacagatacctacttaggtattccagcagacgtggcggcagttcttccagtagacgtggtgactgatcctaacatcttgctgggcatgcagacaacggtacacattgcggagctagtcaaggcatgtcatccgtcacccgatgttgtgagcgctgtaggggagcacctgaactggctcaacaaactcttactcccacttaaggaatcgactcagttgcaaggaagcgagtcgtacaaggagtgccttgcactcttgggtcgtgttcacgctgcgatgaagatggtgagaattggcttagtagtgccccagctgcaatacagaatgtacggtagcctcatcaaccaaatggcccaagtagcacaaaactacgaccgagaattcaagcaattcaaattattcatcatccaaaatcaaatccttggcagctatttgctgcagcagaacagggcatttgctgagagggagctgcagatggagagctttcatgctgctgtcatttctcaaagaagggaggagttggacaatacattcgcaaagatggaccgattgagcgggcaaatggaggcagagagtagtgcaatggagcaagccaaaaaggaaatggacgaaggattgaggcagttccagaataggcaagttgcgaacgccctctttgccgttcttagcgctgtagctcagattgggcttgcattccttacggctggtgcaacggctcctggagctgtggcgtcggcggggcaagctgtgagcatagcaggtcaggcggcgcaaggtctgcgaagggtggtggaaattctagagcagctggaggctgtgatggaggttgtggctgctgtgaaggacctcgtggattcattggaacaggtaggtcagattgtggacgcaccggtgatgccggaattgccctcagaggcggactggtccatttttgtgaacgaggtggaggccgtggcagagggcatgccaacggaagtctcggaggttccggtgtggagggccaagtgcaagaatgtggctgcactgggtcgggagatgagcatcacggcagtacagatgtcggagctgcagtatgacatctgggtgcaaggcatgatgcgggatatggctcgaagccaggcagacaggctggccgcaattcaacccgcggaccttaccaactatttggagatggctacccagatggatatgcggactacgaggatgctgctggggctcctcaacatattgcgcatccagaatgcggcgctcaggtacgagtatcttctaatgcccacggagctcacaacatggccactgggtatggataccgtgggtgacttgctcatcgcgcaggagaatgctgcactgataggattaatgcagctagggccctcatctgatttcacgagcaggcatgtggtgaaagacatacctgtgaacttgctgctcgatggcgaggattgggagtttgagattcctgtgcaagctggcatgtccagcttcccttccagctggtctcgcgtccgtattcggcacctggagatgcactttgtgaaggaggccagcggtattggtggtgagattatccaccagcctaccacccagactgggaccgtttacatccttctgcagggttccactatcttccatgaccgcagaagagaccaggtgttgccttttcaggccgctgctccgctcaactaccattacgcgtaccgcctcgacaccggcgactccactctcacaaacgaaccctctgaacagtttgccaacaagttcatgcagatgacacccttcacccgttggaggcttcgtctgtctgcgtccgcaaaagagaatgcaggattagcctttcccacggctacagcacttgactccactacccagattgtcatcactttccatgttacggccatcagacaaattgactggcggcacgacgaagag

SEQ ID NO: 188 - DNA, 2601 bp, synthetic construct
  misc_feature 1..2601: note = PtIP-83 polypeptide variant encoding sequence
  source 1..2601: mol_type = other DNA
atggctctcgtggattacggcaagcttttcgaggatctgaaccagataagcatgggtgtactggatcgggtagagttttcagaggtgatggtgatccacaggatgtatgtgaggctagctgatctgaatgtggggcagctcgagggagccgagaaagtgaagcagttgtatgtttttagcgacgttctcgtgctaccagtcgtggaatggcggtggccgccgcaaataccaggatcggtgacggtgatcatattgtgtcgtcttcttcaatggccaactgatgggaggcagtcggacaccgagctccacctgacattcatgaagttgcatgccatacaacgagaggaaaatcggtgggagataaccgcagcagatggcatgaactggggagtttacatacacgcagaggaagtacaggttggcgtgctgacaatgtcatggtcttcggtacttagagtttcggcacttcgctctgttataacctccggctttcgcgccgttagtgtgtttgaggtaccgggaagtgtaaggtccacccttggagctactttaaggcccgatcacgccttatatagtacaactatgcaagccacacccaacgcatcgcatattagtgcttttaaccttcgcatagtttccccgtcggcatatcgtgtttgtcctctccaaaatgacacagatacctacttaggtattccagcagacgtggcggcagttcttccagtagacgtggtgactgatcctaacatcttgctgggcatgcagacaacggtacacattgcggagctagtcaaggcatgtcatccgtcacccgatgttgtgagcgctgtaggggagcacctgaactggctcaacaaactcttactcccacttaaggaatcgactcagttgcaaggaagcgagtcgtacaaggagtgccttgcactcttgggtcgtgttcacgctgcgatgaagatggtgagaattggcttagtagtgccccagctgcaatacagaatgtacggtagcctcatcaaccaaatggcccaagtagcacaaaactacgaccgagaattcaagcaattcaaattattcatcatccaaaatcaaatccttggcagctatttgctgcagcagaacagggcatttgctgagagggagctgcagatggagagctttcatgctgctgtcatttctcaaagaagggaggagttggacaatacattcgcaaagatggaccgattgagcgggcaaatggaggcagagagtagtgcaatggagcaagccaaaaaggaaatggacgaaggattgaggcagttccagaataggcaagttgcgaacgccctctttgccgttcttagcgctgtagctcagattgggcttgcattccttacggctggtgcaacggctcctggagctgtggcgtcggcggggcaagctgtgagcatagcaggtcaggcggcgcaaggtctgcgaagggtggtggaaattctagagcagctggaggctgtgatggaggttgtggctgctgtgaaggacctcgtggattcattggaacaggtaggtcagattgtggacgcaccggtgatgccggaattgccctcagaggcggactggtccatttttgtgaacgaggtggaggccgtggcagagggcatgccaacggaagtctcggaggttccggtgtggagggccaagtgcaagaatgtggctgcactgggtcgggagatgagcatcacggcagtacagatgtcggagctgcagtatgacatctgggtgcaaggcatgatgcgggatatggctcgaagccaggcagacaggctggccgcaattcaacccgcggaccttaccaactatttggagatggctacccagatggatatgcggactacgaggatgctgctggggctcctcaacatattgcgcatccagaatgcggcgctcaggtacgagtatcttctaatgcccacggagctcacaacatggccactgggtatggataccgtgggtgacttgctcatcgcgcaggagaatgctgcactgataggattaatgcagctagggccctcatctgatttcacgagcaggcatgtggtgaaagacatacctgtgaacttgctgctcgatggcgaggattgggagtttgagattcctgtgcaagctggcatgtccagcttcccttccagctggtctcgcgtccgtattcggcacctggagatgcactttgtgaaggaggccagcggtattggtggtgagattatccaccagcctaccacccagactgggaccgtttacatccttctgcagggttccactatcttccatgaccgcagaagagaccaggtgttgccttttcaggccgctgctccgctcaactaccattacgcgtaccgcctcgacaccggcgactccactctcacaaacgaaccctctgaacagtttgccaacaagttcatgcagatgacacccttcacccgttggaggcttcgtctgtctgcgtccgcaaaagagaatgcaggattagcctttcccacggctacagcacttgactccactacccagattgtcatcactttccatgttacggccatcagacaaattgactggcggcacgacgaagag

SEQ ID NO: 189 - DNA, 2601 bp, synthetic construct
  misc_feature 1..2601: note = PtIP-83 polypeptide variant encoding sequence
  source 1..2601: mol_type = other DNA
atggctctcgtggattacggcaagcttttcgaggatctgaaccagataagcatgggtgtactggatcgggtagagttttcagaggtgatggtgatccacaggatgtatgtgaggctagctgatctgaatgtggggcagctcgagggagccgagaaagtgaagcgcttctatatctttgccgacatcgtcgagctcccagtcgtggaatggcggtggccgccgcaaataccaggatcggtgacggtgatcatattgtgtcgtcttcttcaatggccaactgatgggaggcagtcggacaccgagctccacctgacattcatgaagttgcatgccatacaacgagaggaaaatcggtgggagataaccgcagcagatggcatgaactggggagtttacatacacgcagaggaagtacaggttggcgtgctgacaatgtcatggtcttcggtacttagagtttcggcacttcgctctgttataacctccggctttcgcgccgttagtgtgtttgaggtaccgggaagtgtaaggtccacccttggagctactttaaggcccgatcacgccttatatagtacaactatgcaagccacacccaacgcatcgcatattagtgcttttaaccttcgcatagtttccccgtcggcatatcgtgtttgtcctctccaaaatgacacagatacctacttaggtattccagcagacgtggcggcagttcttccagtagacgtggtgactgatcctaacatcttgctgggcatgcagacaacggtacacattgcggagctagtcaaggcatgtcatccgtcacccgatgttgtgagcgctgtaggggagcacctgaactggctcaacaaactcttactcccacttaaggaatcgactcagttgcaaggaagcgagtcgtacaaggagtgccttgcactcttgggtcgtgttcacgctgcgatgaagatggtgagaattggcttagtagtgccccagctgcaatacagaatgtacggtagcctcatcaaccaaatggcccaagtagcacaaaactacgaccgagaattcaagcaattcaaattattcatcatccaaaatcaaatccttggcagctatttgctgcagcagaacagggcatttgctgagagggagctgcagatggagagctttcatgctgctgtcatttctcaaagaagggaggagttggacaatacattcgcaaagatggaccgattgagcgggcaaatggaggcagagagtagtgcaatggagcaagccaaaaaggaaatggacgaaggattgaggcagttccagaataggcaagttgcgaacgccctctttgccgttcttagcgctgtagctcagattgggcttgcattccttacggctggtgcaacggctcctggagctgtggcgtcggcggggcaagctgtgagcatagcaggtcaggcggcgcaaggtctgcgaagggtggtggaaattctagagcagctggaggctgtgatggaggttgtggctgctgtgaaggacctcgtggattcattggaacaggtaggtcagattgtggacgcaccggtgatgccggaattgccctcagaggcggactggtccatttttgtgaacgaggtggaggccgtggcagagggcatgccaacggaagtctcggaggttccggtgtggagggccaagtgcaagaatgtggctgcactgggtcgggagatgagcatcacggcagtacagatgtcggagctgcagtatgacatctgggtgcaaggcatgatgcgggatatggctcgaagccaggcagacaggctggccgcaattcaacccgcggaccttaccaactatttggagatggctacccagatggatatgcggactacgaggatgctgctggggctcctcaacatattgcgcatccagaatgcggcgctcaggtacgagtatcttctaatgcccacggagctcacaacatggccactgggtatggataccgtgggtgacttgctcatcgcgcaggagaatgctgcactgataggattaatgcagctagggccctcatctgatttcacgagcaggcatgtggtgaaagacatacctgtgaacttgctgctcgatggcgaggattgggagtttgagattcctgtgcaagctggcatgtccagcttcccttccagctggtctcgcgtccgtattcggcacctggagatgcactttgtgaaggaggccagcggtattggtggtgagattatccaccagcctaccacccagactgggaccgtttacatccttctgcagggttccactatcttccatgaccgcagaagagaccaggtgttgccttttcaggccgctgctccgctcaactaccattacgcgtaccgcctcgacaccggcgactccactctcacaaacgaaccctctgaacagtttgccaacaagttcatgcagatgacacccttcacccgttggaggcttcgtctgtctgcgtccgcaaaagagaatgcaggattagcctttcccacggctacagcacttgactccactacccagattgtcatcactttccatgttacggccatcagacaaattgactggcggcacgacgaagag

SEQ ID NO: 190 - DNA, 2601 bp, synthetic construct
  misc_feature 1..2601: note = PtIP-83 polypeptide variant encoding sequence
  source 1..2601: mol_type = other DNA
atggctctcgtggattacggcaagcttttcgaggatctgaaccagataagcatgggtgtactggatcgggtagagttttcagaggtgatggtgatccacaggatgtatgtgaggctagctgatctgaatgtggggcagctcgagggagccgagaaagtgaagcgcttctatatcttttccgacatcatcgagctcccagtcgtggaatggcggtggccgccgcaaataccaggatcggtgacggtgatcatattgtgtcgtcttcttcaatggccaactgatgggaggcagtcggacaccgagctccacctgacattcatgaagttgcatgccatacaacgagaggaaaatcggtgggagataaccgcagcagatggcatgaactggggagtttacatacacgcagaggaagtacaggttggcgtgctgacaatgtcatggtcttcggtacttagagtttcggcacttcgctctgttataacctccggctttcgcgccgttagtgtgtttgaggtaccgggaagtgtaaggtccacccttggagctactttaaggcccgatcacgccttatatagtacaactatgcaagccacacccaacgcatcgcatattagtgcttttaaccttcgcatagtttccccgtcggcatatcgtgtttgtcctctccaaaatgacacagatacctacttaggtattccagcagacgtggcggcagttcttccagtagacgtggtgactgatcctaacatcttgctgggcatgcagacaacggtacacattgcggagctagtcaaggcatgtcatccgtcacccgatgttgtgagcgctgtaggggagcacctgaactggctcaacaaactcttactcccacttaaggaatcgactcagttgcaaggaagcgagtcgtacaaggagtgccttgcactcttgggtcgtgttcacgctgcgatgaagatggtgagaattggcttagtagtgccccagctgcaatacagaatgtacggtagcctcatcaaccaaatggcccaagtagcacaaaactacgaccgagaattcaagcaattcaaattattcatcatccaaaatcaaatccttggcagctatttgctgcagcagaacagggcatttgctgagagggagctgcagatggagagctttcatgctgctgtcatttctcaaagaagggaggagttggacaatacattcgcaaagatggaccgattgagcgggcaaatggaggcagagagtagtgcaatggagcaagccaaaaaggaaatggacgaaggattgaggcagttccagaataggcaagttgcgaacgccctctttgccgttcttagcgctgtagctcagattgggcttgcattccttacggctggtgcaacggctcctggagctgtggcgtcggcggggcaagctgtgagcatagcaggtcaggcggcgcaaggtctgcgaagggtggtggaaattctagagcagctggaggctgtgatggaggttgtggctgctgtgaaggacctcgtggattcattggaacaggtaggtcagattgtggacgcaccggtgatgccggaattgccctcagaggcggactggtccatttttgtgaacgaggtggaggccgtggcagagggcatgccaacggaagtctcggaggttccggtgtggagggccaagtgcaagaatgtggctgcactgggtcgggagatgagcatcacggcagtacagatgtcggagctgcagtatgacatctgggtgcaaggcatgatgcgggatatggctcgaagccaggcagacaggctggccgcaattcaacccgcggaccttaccaactatttggagatggctacccagatggatatgcggactacgaggatgctgctggggctcctcaacatattgcgcatccagaatgcggcgctcaggtacgagtatcttctaatgcccacggagctcacaacatggccactgggtatggataccgtgggtgacttgctcatcgcgcaggagaatgctgcactgataggattaatgcagctagggccctcatctgatttcacgagcaggcatgtggtgaaagacatacctgtgaacttgctgctcgatggcgaggattgggagtttgagattcctgtgcaagctggcatgtccagcttcccttccagctggtctcgcgtccgtattcggcacctggagatgcactttgtgaaggaggccagcggtattggtggtgagattatccaccagcctaccacccagactgggaccgtttacatccttctgcagggttccactatcttccatgaccgcagaagagaccaggtgttgccttttcaggccgctgctccgctcaactaccattacgcgtaccgcctcgacaccggcgactccactctcacaaacgaaccctctgaacagtttgccaacaagttcatgcagatgacacccttcacccgttggaggcttcgtctgtctgcgtccgcaaaagagaatgcaggattagcctttcccacggctacagcacttgactccactacccagattgtcatcactttccatgttacggccatcagacaaattgactggcggcacgacgaagag

SEQ ID NO: 191 - DNA, 2601 bp, synthetic construct
  misc_feature 1..2601: note = PtIP-83 polypeptide variant encoding sequence
  source 1..2601: mol_type = other DNA
atggctctcgtggattacggcaagcttttcgaggatctgaaccagataagcatgggtgtactggatcgggtagagttttcagaggtgatggtgatccacaggatgtatgtgaggctagctgatctgaatgtggggcagctcgagggagccgagaaagtgaagcgcttctatgtctttagcgacatcgtcgagctcccagtcgtggaatggcggtggccgccgcaaataccaggatcggtgacggtgatcatattgtgtcgtcttcttcaatggccaactgatgggaggcagtcggacaccgagctccacctgacattcatgaagttgcatgccatacaacgagaggaaaatcggtgggagataaccgcagcagatggcatgaactggggagtttacatacacgcagaggaagtacaggttggcgtgctgacaatgtcatggtcttcggtacttagagtttcggcacttcgctctgttataacctccggctttcgcgccgttagtgtgtttgaggtaccgggaagtgtaaggtccacccttggagctactttaaggcccgatcacgccttatatagtacaactatgcaagccacacccaacgcatcgcatattagtgcttttaaccttcgcatagtttccccgtcggcatatcgtgtttgtcctctccaaaatgacacagatacctacttaggtattccagcagacgtggcggcagttcttccagtagacgtggtgactgatcctaacatcttgctgggcatgcagacaacggtacacattgcggagctagtcaaggcatgtcatccgtcacccgatgttgtgagcgctgtaggggagcacctgaactggctcaacaaactcttactcccacttaaggaatcgactcagttgcaaggaagcgagtcgtacaaggagtgccttgcactcttgggtcgtgttcacgctgcgatgaagatggtgagaattggcttagtagtgccccagctgcaatacagaatgtacggtagcctcatcaaccaaatggcccaagtagcacaaaactacgaccgagaattcaagcaattcaaattattcatcatccaaaatcaaatccttggcagctatttgctgcagcagaacagggcatttgctgagagggagctgcagatggagagctttcatgctgctgtcatttctcaaagaagggaggagttggacaatacattcgcaaagatggaccgattgagcgggcaaatggaggcagagagtagtgcaatggagcaagccaaaaaggaaatggacgaaggattgaggcagttccagaataggcaagttgcgaacgccctctttgccgttcttagcgctgtagctcagattgggcttgcattccttacggctggtgcaacggctcctggagctgtggcgtcggcggggcaagctgtgagcatagcaggtcaggcggcgcaaggtctgcgaagggtggtggaaattctagagcagctggaggctgtgatggaggttgtggctgctgtgaaggacctcgtggattcattggaacaggtaggtcagattgtggacgcaccggtgatgccggaattgccctcagaggcggactggtccatttttgtgaacgaggtggaggccgtggcagagggcatgccaacggaagtctcggaggttccggtgtggagggccaagtgcaagaatgtggctgcactgggtcgggagatgagcatcacggcagtacagatgtcggagctgcagtatgacatctgggtgcaaggcatgatgcgggatatggctcgaagccaggcagacaggctggccgcaattcaacccgcggaccttaccaactatttggagatggctacccagatggatatgcggactacgaggatgctgctggggctcctcaacatattgcgcatccagaatgcggcgctcaggtacgagtatcttctaatgcccacggagctcacaacatggccactgggtatggataccgtgggtgacttgctcatcgcgcaggagaatgctgcactgataggattaatgcagctagggccctcatctgatttcacgagcaggcatgtggtgaaagacatacctgtgaacttgctgctcgatggcgaggattgggagtttgagattcctgtgcaagctggcatgtccagcttcccttccagctggtctcgcgtccgtattcggcacctggagatgcactttgtgaaggaggccagcggtattggtggtgagattatccaccagcctaccacccagactgggaccgtttacatccttctgcagggttccactatcttccatgaccgcagaagagaccaggtgttgccttttcaggccgctgctccgctcaactaccattacgcgtaccgcctcgacaccggcgactccactctcacaaacgaaccctctgaacagtttgccaacaagttcatgcagatgacacccttcacccgttggaggcttcgtctgtctgcgtccgcaaaagagaatgcaggattagcctttcccacggctacagcacttgactccactacccagattgtcatcactttccatgttacggccatcagacaaattgactggcggcacgacgaagag

SEQ ID NO: 192 - DNA, 2601 bp, synthetic construct
  misc_feature 1..2601: note = PtIP-83 polypeptide variant encoding sequence
  source 1..2601: mol_type = other DNA
atggctctcgtggattacggcaagcttttcgaggatctgaaccagataagcatgggtgtactggatcgggtagagttttcagaggtgatggtgatccacaggatgtatgtgaggctagctgatctgaatgtggggcagctcgagggagccgagaaagtgaagcgcctcgtcatcttgggcgacatcatcgtggtcccagtcgtggaatggcggtggccgccgcaaataccaggatcggtgacggtgatcatattgtgtcgtcttcttcaatggccaactgatgggaggcagtcggacaccgagctccacctgacattcatgaagttgcatgccatacaacgagaggaaaatcggtgggagataaccgcagcagatggcatgaactggggagtttacatacacgcagaggaagtacaggttggcgtgctgacaatgtcatggtcttcggtacttagagtttcggcacttcgctctgttataacctccggctttcgcgccgttagtgtgtttgaggtaccgggaagtgtaaggtccacccttggagctactttaaggcccgatcacgccttatatagtacaactatgcaagccacacccaacgcatcgcatattagtgcttttaaccttcgcatagtttccccgtcggcatatcgtgtttgtcctctccaaaatgacacagatacctacttaggtattccagcagacgtggcggcagttcttccagtagacgtggtgactgatcctaacatcttgctgggcatgcagacaacggtacacattgcggagctagtcaaggcatgtcatccgtcacccgatgttgtgagcgctgtaggggagcacctgaactggctcaacaaactcttactcccacttaaggaatcgactcagttgcaaggaagcgagtcgtacaaggagtgccttgcactcttgggtcgtgttcacgctgcgatgaagatggtgagaattggcttagtagtgccccagctgcaatacagaatgtacggtagcctcatcaaccaaatggcccaagtagcacaaaactacgaccgagaattcaagcaattcaaattattcatcatccaaaatcaaatccttggcagctatttgctgcagcagaacagggcatttgctgagagggagctgcagatggagagctttcatgctgctgtcatttctcaaagaagggaggagttggacaatacattcgcaaagatggaccgattgagcgggcaaatggaggcagagagtagtgcaatggagcaagccaaaaaggaaatggacgaaggattgaggcagttccagaataggcaagttgcgaacgccctctttgccgttcttagcgctgtagctcagattgggcttgcattccttacggctggtgcaacggctcctggagctgtggcgtcggcggggcaagctgtgagcatagcaggtcaggcggcgcaaggtctgcgaagggtggtggaaattctagagcagctggaggctgtgatggaggttgtggctgctgtgaaggacctcgtggattcattggaacaggtaggtcagattgtggacgcaccggtgatgccggaattgccctcagaggcggactggtccatttttgtgaacgaggtggaggccgtggcagagggcatgccaacggaagtctcggaggttccggtgtggagggccaagtgcaagaatgtggctgcactgggtcgggagatgagcatcacggcagtacagatgtcggagctgcagtatgacatctgggtgcaaggcatgatgcgggatatggctcgaagccaggcagacaggctggccgcaattcaacccgcggaccttaccaactatttggagatggctacccagatggatatgcggactacgaggatgctgctggggctcctcaacatattgcgcatccagaatgcggcgctcaggtacgagtatcttctaatgcccacggagctcacaacatggccactgggtatggataccgtgggtgacttgctcatcgcgcaggagaatgctgcactgataggattaatgcagctagggccctcatctgatttcacgagcaggcatgtggtgaaagacatacctgtgaacttgctgctcgatggcgaggattgggagtttgagattcctgtgcaagctggcatgtccagcttcccttccagctggtctcgcgtccgtattcggcacctggagatgcactttgtgaaggaggccagcggtattggtggtgagattatccaccagcctaccacccagactgggaccgtttacatccttctgcagggttccactatcttccatgaccgcagaagagaccaggtgttgccttttcaggccgctgctccgctcaactaccattacgcgtaccgcctcgacaccggcgactccactctcacaaacgaaccctctgaacagtttgccaacaagttcatgcagatgacacccttcacccgttggaggcttcgtctgtctgcgtccgcaaaagagaatgcaggattagcctttcccacggctacagcacttgactccactacccagattgtcatcactttccatgttacggccatcagacaaattgactggcggcacgacgaagag

SEQ ID NO: 193 - DNA, 2601 bp, synthetic construct
  misc_feature 1..2601: note = PtIP-83 polypeptide variant encoding sequence
  source 1..2601: mol_type = other DNA
atggctctcgtggattacggcaagcttttcgaggatctgaaccagataagcatgggtgtactggatcgggtagagttttcagaggtgatggtgatccacaggatgtatgtgaggctagctgatctgaatgtggggcagctcgagggagccgagaaagtgaagcgcttgtatatttttgccgacattatcgagctaccagtcgtggaatggcggtggccgccgcaaataccaggatcggtgacggtgatcatattgtgtcgtcttcttcaatggccaactgatgggaggcagtcggacaccgagctccacctgacattcatgaagttgcatgccatacaacgagaggaaaatcggtgggagataaccgcagcagatggcatgaactggggagtttacatacacgcagaggaagtacaggttggcgtgctgacaatgtcatggtcttcggtacttagagtttcggcacttcgctctgttataacctccggctttcgcgccgttagtgtgtttgaggtaccgggaagtgtaaggtccacccttggagctactttaaggcccgatcacgccttatatagtacaactatgcaagccacacccaacgcatcgcatattagtgcttttaaccttcgcatagtttccccgtcggcatatcgtgtttgtcctctccaaaatgacacagatacctacttaggtattccagcagacgtggcggcagttcttccagtagacgtggtgactgatcctaacatcttgctgggcatgcagacaacggtacacattgcggagctagtcaaggcatgtcatccgtcacccgatgttgtgagcgctgtaggggagcacctgaactggctcaacaaactcttactcccacttaaggaatcgactcagttgcaaggaagcgagtcgtacaaggagtgccttgcactcttgggtcgtgttcacgctgcgatgaagatggtgagaattggcttagtagtgccccagctgcaatacagaatgtacggtagcctcatcaaccaaatggcccaagtagcacaaaactacgaccgagaattcaagcaattcaaattattcatcatccaaaatcaaatccttggcagctatttgctgcagcagaacagggcatttgctgagagggagctgcagatggagagctttcatgctgctgtcatttctcaaagaagggaggagttggacaatacattcgcaaagatggaccgattgagcgggcaaatggaggcagagagtagtgcaatggagcaagccaaaaaggaaatggacgaaggattgaggcagttccagaataggcaagttgcgaacgccctctttgccgttcttagcgctgtagctcagattgggcttgcattccttacggctggtgcaacggctcctggagctgtggcgtcggcggggcaagctgtgagcatagcaggtcaggcggcgcaaggtctgcgaagggtggtggaaattctagagcagctggaggctgtgatggaggttgtggctgctgtgaaggacctcgtggattcattggaacaggtaggtcagattgtggacgcaccggtgatgccggaattgccctcagaggcggactggtccatttttgtgaacgaggtggaggccgtggcagagggcatgccaacggaagtctcggaggttccggtgtggagggccaagtgcaagaatgtggctgcactgggtcgggagatgagcatcacggcagtacagatgtcggagctgcagtatgacatctgggtgcaaggcatgatgcgggatatggctcgaagccaggcagacaggctggccgcaattcaacccgcggaccttaccaactatttggagatggctacccagatggatatgcggactacgaggatgctgctggggctcctcaacatattgcgcatccagaatgcggcgctcaggtacgagtatcttctaatgcccacggagctcacaacatggccactgggtatggataccgtgggtgacttgctcatcgcgcaggagaatgctgcactgataggattaatgcagctagggccctcatctgatttcacgagcaggcatgtggtgaaagacatacctgtgaacttgctgctcgatggcgaggattgggagtttgagattcctgtgcaagctggcatgtccagcttcccttccagctggtctcgcgtccgtattcggcacctggagatgcactttgtgaaggaggccagcggtattggtggtgagattatccaccagcctaccacccagactgggaccgtttacatccttctgcagggttccactatcttccatgaccgcagaagagaccaggtgttgccttttcaggccgctgctccgctcaactaccattacgcgtaccgcctcgacaccggcgactccactctcacaaacgaaccctctgaacagtttgccaacaagttcatgcagatgacacccttcacccgttggaggcttcgtctgtctgcgtccgcaaaagagaatgcaggattagcctttcccacggctacagcacttgactccactacccagattgtcatcactttccatgttacggccatcagacaaattgactggcggcacgacgaagag

SEQ ID NO: 194 - DNA, 2601 bp, synthetic construct
  misc_feature 1..2601: note = PtIP-83 polypeptide variant encoding sequence
  source 1..2601: mol_type = other DNA
atggctctcgtggattacggcaagcttttcgaggatctgaaccagataagcatgggtgtactggatcgggtagagttttcagaggtgatggtgatccacaggatgtatgtgaggctagctgatctgaatgtggggcagctcgagggagccgagaaagtgaagcgcttgtatattttttgcgacattatcgtgctaccagtcgtggaatggcggtggccgccgcaaataccaggatcggtgacggtgatcatattgtgtcgtcttcttcaatggccaactgatgggaggcagtcggacaccgagctccacctgacattcatgaagttgcatgccatacaacgagaggaaaatcggtgggagataaccgcagcagatggcatgaactggggagtttacatacacgcagaggaagtacaggttggcgtgctgacaatgtcatggtcttcggtacttagagtttcggcacttcgctctgttataacctccggctttcgcgccgttagtgtgtttgaggtaccgggaagtgtaaggtccacccttggagctactttaaggcccgatcacgccttatatagtacaactatgcaagccacacccaacgcatcgcatattagtgcttttaaccttcgcatagtttccccgtcggcatatcgtgtttgtcctctccaaaatgacacagatacctacttaggtattccagcagacgtggcggcagttcttccagtagacgtggtgactgatcctaacatcttgctgggcatgcagacaacggtacacattgcggagctagtcaaggcatgtcatccgtcacccgatgttgtgagcgctgtaggggagcacctgaactggctcaacaaactcttactcccacttaaggaatcgactcagttgcaaggaagcgagtcgtacaaggagtgccttgcactcttgggtcgtgttcacgctgcgatgaagatggtgagaattggcttagtagtgccccagctgcaatacagaatgtacggtagcctcatcaaccaaatggcccaagtagcacaaaactacgaccgagaattcaagcaattcaaattattcatcatccaaaatcaaatccttggcagctatttgctgcagcagaacagggcatttgctgagagggagctgcagatggagagctttcatgctgctgtcatttctcaaagaagggaggagttggacaatacattcgcaaagatggaccgattgagcgggcaaatggaggcagagagtagtgcaatggagcaagccaaaaaggaaatggacgaaggattgaggcagttccagaataggcaagttgcgaacgccctctttgccgttcttagcgctgtagctcagattgggcttgcattccttacggctggtgcaacggctcctggagctgtggcgtcggcggggcaagctgtgagcatagcaggtcaggcggcgcaaggtctgcgaagggtggtggaaattctagagcagctggaggctgtgatggaggttgtggctgctgtgaaggacctcgtggattcattggaacaggtaggtcagattgtggacgcaccggtgatgccggaattgccctcagaggcggactggtccatttttgtgaacgaggtggaggccgtggcagagggcatgccaacggaagtctcggaggttccggtgtggagggccaagtgcaagaatgtggctgcactgggtcgggagatgagcatcacggcagtacagatgtcggagctgcagtatgacatctgggtgcaaggcatgatgcgggatatggctcgaagccaggcagacaggctggccgcaattcaacccgcggaccttaccaactatttggagatggctacccagatggatatgcggactacgaggatgctgctggggctcctcaacatattgcgcatccagaatgcggcgctcaggtacgagtatcttctaatgcccacggagctcacaacatggccactgggtatggataccgtgggtgacttgctcatcgcgcaggagaatgctgcactgataggattaatgcagctagggccctcatctgatttcacgagcaggcatgtggtgaaagacatacctgtgaacttgctgctcgatggcgaggattgggagtttgagattcctgtgcaagctggcatgtccagcttcccttccagctggtctcgcgtccgtattcggcacctggagatgcactttgtgaaggaggccagcggtattggtggtgagattatccaccagcctaccacccagactgggaccgtttacatccttctgcagggttccactatcttccatgaccgcagaagagaccaggtgttgccttttcaggccgctgctccgctcaactaccattacgcgtaccgcctcgacaccggcgactccactctcacaaacgaaccctctgaacagtttgccaacaagttcatgcagatgacacccttcacccgttggaggcttcgtctgtctgcgtccgcaaaagagaatgcaggattagcctttcccacggctacagcacttgactccactacccagattgtcatcactttccatgttacggccatcagacaaattgactggcggcacgacgaagag

SEQ ID NO: 195 - DNA, 2601 bp, synthetic construct
  misc_feature 1..2601: note = PtIP-83 polypeptide variant encoding sequence
  source 1..2601: mol_type = other DNA
atggctctcgtggattacggcaagcttttcgaggatctgaaccagataagcatgggtgtactggatcgggtagagttttcagaggtgatggtgatccacaggatgtatgtgaggctagctgatctgaatgtggggcagctcgagggagccgagaaagtgaagcgcttgtatattttttgcgacattgtcgagctaccagtcgtggaatggcggtggccgccgcaaataccaggatcggtgacggtgatcatattgtgtcgtcttcttcaatggccaactgatgggaggcagtcggacaccgagctccacctgacattcatgaagttgcatgccatacaacgagaggaaaatcggtgggagataaccgcagcagatggcatgaactggggagtttacatacacgcagaggaagtacaggttggcgtgctgacaatgtcatggtcttcggtacttagagtttcggcacttcgctctgttataacctccggctttcgcgccgttagtgtgtttgaggtaccgggaagtgtaaggtccacccttggagctactttaaggcccgatcacgccttatatagtacaactatgcaagccacacccaacgcatcgcatattagtgcttttaaccttcgcatagtttccccgtcggcatatcgtgtttgtcctctccaaaatgacacagatacctacttaggtattccagcagacgtggcggcagttcttccagtagacgtggtgactgatcctaacatcttgctgggcatgcagacaacggtacacattgcggagctagtcaaggcatgtcatccgtcacccgatgttgtgagcgctgtaggggagcacctgaactggctcaacaaactcttactcccacttaaggaatcgactcagttgcaaggaagcgagtcgtacaaggagtgccttgcactcttgggtcgtgttcacgctgcgatgaagatggtgagaattggcttagtagtgccccagctgcaatacagaatgtacggtagcctcatcaaccaaatggcccaagtagcacaaaactacgaccgagaattcaagcaattcaaattattcatcatccaaaatcaaatccttggcagctatttgctgcagcagaacagggcatttgctgagagggagctgcagatggagagctttcatgctgctgtcatttctcaaagaagggaggagttggacaatacattcgcaaagatggaccgattgagcgggcaaatggaggcagagagtagtgcaatggagcaagccaaaaaggaaatggacgaaggattgaggcagttccagaataggcaagttgcgaacgccctctttgccgttcttagcgctgtagctcagattgggcttgcattccttacggctggtgcaacggctcctggagctgtggcgtcggcggggcaagctgtgagcatagcaggtcaggcggcgcaaggtctgcgaagggtggtggaaattctagagcagctggaggctgtgatggaggttgtggctgctgtgaaggacctcgtggattcattggaacaggtaggtcagattgtggacgcaccggtgatgccggaattgccctcagaggcggactggtccatttttgtgaacgaggtggaggccgtggcagagggcatgccaacggaagtctcggaggttccggtgtggagggccaagtgcaagaatgtggctgcactgggtcgggagatgagcatcacggcagtacagatgtcggagctgcagtatgacatctgggtgcaaggcatgatgcgggatatggctcgaagccaggcagacaggctggccgcaattcaacccgcggaccttaccaactatttggagatggctacccagatggatatgcggactacgaggatgctgctggggctcctcaacatattgcgcatccagaatgcggcgctcaggtacgagtatcttctaatgcccacggagctcacaacatggccactgggtatggataccgtgggtgacttgctcatcgcgcaggagaatgctgcactgataggattaatgcagctagggccctcatctgatttcacgagcaggcatgtggtgaaagacatacctgtgaacttgctgctcgatggcgaggattgggagtttgagattcctgtgcaagctggcatgtccagcttcccttccagctggtctcgcgtccgtattcggcacctggagatgcactttgtgaaggaggccagcggtattggtggtgagattatccaccagcctaccacccagactgggaccgtttacatccttctgcagggttccactatcttccatgaccgcagaagagaccaggtgttgccttttcaggccgctgctccgctcaactaccattacgcgtaccgcctcgacaccggcgactccactctcacaaacgaaccctctgaacagtttgccaacaagttcatgcagatgacacccttcacccgttggaggcttcgtctgtctgcgtccgcaaaagagaatgcaggattagcctttcccacggctacagcacttgactccactacccagattgtcatcactttccatgttacggccatcagacaaattgactggcggcacgacgaagag

SEQ ID NO: 196 - DNA, 2601 bp, synthetic construct
  misc_feature 1..2601: note = PtIP-83 polypeptide variant encoding sequence
  source 1..2601: mol_type = other DNA
atggctctcgtggattacggcaagcttttcgaggatctgaaccagataagcatgggtgtactggatcgggtagagttttcagaggtgatggtgatccacaggatgtatgtgaggctagctgatctgaatgtggggcagctcgagggagccgagaaagtgaagcgcttgtatatttttggcgacattatcgagctaccagtcgtggaatggcggtggccggcgcaaataccaggatcggtgacggtgatcatattgtgtcgtcttcttcaatggccaactgatgggaggcagtcggacaccgagctccacctgacattcatgaagttgcatgccatacaacgagaggaaaatcggtgggagataaccgcagcagatggcatgaactggggagtttacatacacgcagaggaagtacaggttggcgtgctgacaatgtcatggtcttcggtacttagagtttcggcacttcgctctgttataacctccggctttcgcgccgttagtgtgtttgaggtaccgggaagtgtaaggtccacccttggagctactttaaggcccgatcacgccttatatagtacaactatgcaagccacacccaacgcatcgcatattagtgcttttaaccttcgcatagtttccccgtcggcatatcgtgtttgtcctctccaaaatgacacagatacctacttaggtattccagcagacgtggcggcagttcttccagtagacgtggtgactgatcctaacatcttgctgggcatgcagacaacggtacacattgcggagctagtcaaggcatgtcatccgtcacccgatgttgtgagcgctgtaggggagcacctgaactggctcaacaaactcttactcccacttaaggaatcgactcagttgcaaggaagcgagtcgtacaaggagtgccttgcactcttgggtcgtgttcacgctgcgatgaagatggtgagaattggcttagtagtgccccagctgcaatacagaatgtacggtagcctcatcaaccaaatggcccaagtagcacaaaactacgaccgagaattcaagcaattcaaattattcatcatccaaaatcaaatccttggcagctatttgctgcagcagaacagggcatttgctgagagggagctgcagatggagagctttcatgctgctgtcatttctcaaagaagggaggagttggacaatacattcgcaaagatggaccgattgagcgggcaaatggaggcagagagtagtgcaatggagcaagccaaaaaggaaatggacgaaggattgaggcagttccagaataggcaagttgcgaacgccctctttgccgttcttagcgctgtagctcagattgggcttgcattccttacggctggtgcaacggctcctggagctgtggcgtcggcggggcaagctgtgagcatagcaggtcaggcggcgcaaggtctgcgaagggtggtggaaattctagagcagctggaggctgtgatggaggttgtggctgctgtgaaggacctcgtggattcattggaacaggtaggtcagattgtggacgcaccggtgatgccggaattgccctcagaggcggactggtccatttttgtgaacgaggtggaggccgtggcagagggcatgccaacggaagtctcggaggttccggtgtggagggccaagtgcaagaatgtggctgcactgggtcgggagatgagcatcacggcagtacagatgtcggagctgcagtatgacatctgggtgcaaggcatgatgcgggatatggctcgaagccaggcagacaggctggccgcaattcaacccgcggaccttaccaactatttggagatggctacccagatggatatgcggactacgaggatgctgctggggctcctcaacatattgcgcatccagaatgcggcgctcaggtacgagtatcttctaatgcccacggagctcacaacatggccactgggtatggataccgtgggtgacttgctcatcgcgcaggagaatgctgcactgataggattaatgcagctagggccctcatctgatttcacgagcaggcatgtggtgaaagacatacctgtgaacttgctgctcgatggcgaggattgggagtttgagattcctgtgcaagctggcatgtccagcttcccttccagctggtctcgcgtccgtattcggcacctggagatgcactttgtgaaggaggccagcggtattggtggtgagattatccaccagcctaccacccagactgggaccgtttacatccttctgcagggttccactatcttccatgaccgcagaagagaccaggtgttgccttttcaggccgctgctccgctcaactaccattacgcgtaccgcctcgacaccggcgactccactctcacaaacgaaccctctgaacagtttgccaacaagttcatgcagatgacacccttcacccgttggaggcttcgtctgtctgcgtccgcaaaagagaatgcaggattagcctttcccacggctacagcacttgactccactacccagattgtcatcactttccatgttacggccatcagacaaattgactggcggcacgacgaagag

SEQ ID NO: 197 - DNA, 2601 bp, synthetic construct
  misc_feature 1..2601: note = PtIP-83 polypeptide variant encoding sequence
  source 1..2601: mol_type = other DNA
atggctctcgtggattacggcaagcttttcgaggatctgaaccagataagcatgggtgtactggatcgggtagagttttcagaggtgatggtgatccacaggatgtatgtgaggctagctgatctgaatgtggggcagctcgagggagccgagaaagtgaagcgcttgtatatttttggcgacgttatcgagctaccagtcgtggaatggcggtggccgccgcaaataccaggatcggtgacggtgatcatattgtgtcgtcttcttcaatggccaactgatgggaggcagtcggacaccgagctccacctgacattcatgaagttgcatgccatacaacgagaggaaaatcggtgggagataaccgcagcagatggcatgaactggggagtttacatacacgcagaggaagtacaggttggcgtgctgacaatgtcatggtcttcggtacttagagtttcggcacttcgctctgttataacctccggctttcgcgccgttagtgtgtttgaggtaccgggaagtgtaaggtccacccttggagctactttaaggcccgatcacgccttatatagtacaactatgcaagccacacccaacgcatcgcatattagtgcttttaaccttcgcatagtttccccgtcggcatatcgtgtttgtcctctccaaaatgacacagatacctacttaggtattccagcagacgtggcggcagttcttccagtagacgtggtgactgatcctaacatcttgctgggcatgcagacaacggtacacattgcggagctagtcaaggcatgtcatccgtcacccgatgttgtgagcgctgtaggggagcacctgaactggctcaacaaactcttactcccacttaaggaatcgactcagttgcaaggaagcgagtcgtacaaggagtgccttgcactcttgggtcgtgttcacgctgcgatgaagatggtgagaattggcttagtagtgccccagctgcaatacagaatgtacggtagcctcatcaaccaaatggcccaagtagcacaaaactacgaccgagaattcaagcaattcaaattattcatcatccaaaatcaaatccttggcagctatttgctgcagcagaacagggcatttgctgagagggagctgcagatggagagctttcatgctgctgtcatttctcaaagaagggaggagttggacaatacattcgcaaagatggaccgattgagcgggcaaatggaggcagagagtagtgcaatggagcaagccaaaaaggaaatggacgaaggattgaggcagttccagaataggcaagttgcgaacgccctctttgccgttcttagcgctgtagctcagattgggcttgcattccttacggctggtgcaacggctcctggagctgtggcgtcggcggggcaagctgtgagcatagcaggtcaggcggcgcaaggtctgcgaagggtggtggaaattctagagcagctggaggctgtgatggaggttgtggctgctgtgaaggacctcgtggattcattggaacaggtaggtcagattgtggacgcaccggtgatgccggaattgccctcagaggcggactggtccatttttgtgaacgaggtggaggccgtggcagagggcatgccaacggaagtctcggaggttccggtgtggagggccaagtgcaagaatgtggctgcactgggtcgggagatgagcatcacggcagtacagatgtcggagctgcagtatgacatctgggtgcaaggcatgatgcgggatatggctcgaagccaggcagacaggctggccgcaattcaacccgcggaccttaccaactatttggagatggctacccagatggatatgcggactacgaggatgctgctggggctcctcaacatattgcgcatccagaatgcggcgctcaggtacgagtatcttctaatgcccacggagctcacaacatggccactgggtatggataccgtgggtgacttgctcatcgcgcaggagaatgctgcactgataggattaatgcagctagggccctcatctgatttcacgagcaggcatgtggtgaaagacatacctgtgaacttgctgctcgatggcgaggattgggagtttgagattcctgtgcaagctggcatgtccagcttcccttccagctggtctcgcgtccgtattcggcacctggagatgcactttgtgaaggaggccagcggtattggtggtgagattatccaccagcctaccacccagactgggaccgtttacatccttctgcagggttccactatcttccatgaccgcagaagagaccaggtgttgccttttcaggccgctgctccgctcaactaccattacgcgtaccgcctcgacaccggcgactccactctcacaaacgaaccctctgaacagtttgccaacaagttcatgcagatgacacccttcacccgttggaggcttcgtctgtctgcgtccgcaaaagagaatgcaggattagcctttcccacggctacagcacttgactccactacccagattgtcatcactttccatgttacggccatcagacaaattgactggcggcacgacgaagag

SEQ ID NO: 198 - DNA, 2601 bp, synthetic construct
  misc_feature 1..2601: note = PtIP-83 polypeptide variant encoding sequence
  source 1..2601: mol_type = other DNA
atggctctcgtggattacggcaagcttttcgaggatctgaaccagataagcatgggtgtactggatcgggtagagttttcagaggtgatggtgatccacaggatgtatgtgaggctagctgatctgaatgtggggcagctcgagggagccgagaaagtgaagcgcttgtatattttttccgacattatcgtgctaccagtcgtggaatggcggtggccgccgcaaataccaggatcggtgacggtgatcatattgtgtcgtcttcttcaatggccaactgatgggaggcagtcggacaccgagctccacctgacattcatgaagttgcatgccatacaacgagaggaaaatcggtgggagataaccgcagcagatggcatgaactggggagtttacatacacgcagaggaagtacaggttggcgtgctgacaatgtcatggtcttcggtacttagagtttcggcacttcgctctgttataacctccggctttcgcgccgttagtgtgtttgaggtaccgggaagtgtaaggtccacccttggagctactttaaggcccgatcacgccttatatagtacaactatgcaagccacacccaacgcatcgcatattagtgcttttaaccttcgcatagtttccccgtcggcatatcgtgtttgtcctctccaaaatgacacagatacctacttaggtattccagcagacgtggcggcagttcttccagtagacgtggtgactgatcctaacatcttgctgggcatgcagacaacggtacacattgcggagctagtcaaggcatgtcatccgtcacccgatgttgtgagcgctgtaggggagcacctgaactggctcaacaaactcttactcccacttaaggaatcgactcagttgcaaggaagcgagtcgtacaaggagtgccttgcactcttgggtcgtgttcacgctgcgatgaagatggtgagaattggcttagtagtgccccagctgcaatacagaatgtacggtagcctcatcaaccaaatggcccaagtagcacaaaactacgaccgagaattcaagcaattcaaattattcatcatccaaaatcaaatccttggcagctatttgctgcagcagaacagggcatttgctgagagggagctgcagatggagagctttcatgctgctgtcatttctcaaagaagggaggagttggacaatacattcgcaaagatggaccgattgagcgggcaaatggaggcagagagtagtgcaatggagcaagccaaaaaggaaatggacgaaggattgaggcagttccagaataggcaagttgcgaacgccctctttgccgttcttagcgctgtagctcagattgggcttgcattccttacggctggtgcaacggctcctggagctgtggcgtcggcggggcaagctgtgagcatagcaggtcaggcggcgcaaggtctgcgaagggtggtggaaattctagagcagctggaggctgtgatggaggttgtggctgctgtgaaggacctcgtggattcattggaacaggtaggtcagattgtggacgcaccggtgatgccggaattgccctcagaggcggactggtccatttttgtgaacgaggtggaggccgtggcagagggcatgccaacggaagtctcggaggttccggtgtggagggccaagtgcaagaatgtggctgcactgggtcgggagatgagcatcacggcagtacagatgtcggagctgcagtatgacatctgggtgcaaggcatgatgcgggatatggctcgaagccaggcagacaggctggccgcaattcaacccgcggaccttaccaactatttggagatggctacccagatggatatgcggactacgaggatgctgctggggctcctcaacatattgcgcatccagaatgcggcgctcaggtacgagtatcttctaatgcccacggagctcacaacatggccactgggtatggataccgtgggtgacttgctcatcgcgcaggagaatgctgcactgataggattaatgcagctagggccctcatctgatttcacgagcaggcatgtggtgaaagacatacctgtgaacttgctgctcgatggcgaggattgggagtttgagattcctgtgcaagctggcatgtccagcttcccttccagctggtctcgcgtccgtattcggcacctggagatgcactttgtgaaggaggccagcggtattggtggtgagattatccaccagcctaccacccagactgggaccgtttacatccttctgcagggttccactatcttccatgaccgcagaagagaccaggtgttgccttttcaggccgctgctccgctcaactaccattacgcgtaccgcctcgacaccggcgactccactctcacaaacgaaccctctgaacagtttgccaacaagttcatgcagatgacacccttcacccgttggaggcttcgtctgtctgcgtccgcaaaagagaatgcaggattagcctttcccacggctacagcacttgactccactacccagattgtcatcactttccatgttacggccatcagacaaattgactggcggcacgacgaagag

SEQ ID NO: 199 - DNA, 2601 bp, synthetic construct
  misc_feature 1..2601: note = PtIP-83 polypeptide variant encoding sequence
  source 1..2601: mol_type = other DNA
atggctctcgtggattacggcaagcttttcgaggatctgaaccagataagcatgggtgtactggatcgggtagagttttcagaggtgatggtgatccacaggatgtatgtgaggctagctgatctgaatgtggggcagctcgagggagccgagaaagtgaagcggttgtatatttttagcgacattctcgagctaccagtcgtggaatggcggtggccgccgcaaataccgggatcggtgacggtgatcatattgtgtcgtcttcttcaatggccaactgatgggaggcagtcggacaccgagctccacctgacattcatgaagttgcatgccatacaacgagaggaaaatcggtgggagataaccgcagcagatggcatgaactggggagtttacatacacgcagaggaagtacaggttggcgtgctgacaatgtcatggtcttcggtacttagagtttcggcacttcgctctgttataacctccggctttcgcgccgttagtgtgtttgaggtaccgggaagtgtaaggtccacccttggagctactttaaggcccgatcacgccttatatagtacaactatgcaagccacacccaacgcatcgcatattagtgcttttaaccttcgcatagtttccccgtcggcatatcgtgtttgtcctctccaaaatgacacagatacctacttaggtattccagcagacgtggcggcagttcttccagtagacgtggtgactgatcctaacatcttgctgggcatgcagacaacggtacacattgcggagctagtcaaggcatgtcatccgtcacccgatgttgtgagcgctgtaggggagcacctgaactggctcaacaaactcttactcccacttaaggaatcgactcagttgcaaggaagcgagtcgtacaaggagtgccttgcactcttgggtcgtgttcacgctgcgatgaagatggtgagaattggcttagtagtgccccagctgcaatacagaatgtacggtagcctcatcaaccaaatggcccaagtagcacaaaactacgaccgagaattcaagcaattcaaattattcatcatccaaaatcaaatccttggcagctatttgctgcagcagaacagggcatttgctgagagggagctgcagatggagagctttcatgctgctgtcatttctcaaagaagggaggagttggacaatacattcgcaaagatggaccgattgagcgggcaaatggaggcagagagtagtgcaatggagcaagccaaaaaggaaatggacgaaggattgaggcagttccagaataggcaagttgcgaacgccctctttgccgttcttagcgctgtagctcagattgggcttgcattccttacggctggtgcaacggctcctggagctgtggcgtcggcggggcaagctgtgagcatagcaggtcaggcggcgcaaggtctgcgaagggtggtggaaattctagagcagctggaggctgtgatggaggttgtggctgctgtgaaggacctcgtggattcattggaacaggtaggtcagattgtggacgcaccggtgatgccggaattgccctcagaggcggactggtccatttttgtgaacgaggtggaggccgtggcagagggcatgccaacggaagtctcggaggttccggtgtggagggccaagtgcaagaatgtggctgcactgggtcgggagatgagcatcacggcagtacagatgtcggagctgcagtatgacatctgggtgcaaggcatgatgcgggatatggctcgaagccaggcagacaggctggccgcaattcaacccgcggaccttaccaactatttggagatggctacccagatggatatgcggactacgaggatgctgctggggctcctcaacatattgcgcatccagaatgcggcgctcaggtacgagtatcttctaatgcccacggagctcacaacatggccactgggtatggataccgtgggtgacttgctcatcgcgcaggagaatgctgcactgataggattaatgcagctagggccctcatctgatttcacgagcaggcatgtggtgaaagacatacctgtgaacttgctgctcgatggcgaggattgggagtttgagattcctgtgcaagctggcatgtccagcttcccttccagctggtctcgcgtccgtattcggcacctggagatgcactttgtgaaggaggccagcggtattggtggtgagattatccaccagcctaccacccagactgggaccgtttacatccttctgcagggttccactatcttccatgaccgcagaagagaccaggtgttgccttttcaggccgctgctccgctcaactaccattacgcgtaccgcctcgacaccggcgactccactctcacaaacgaaccctctgaacagtttgccaacaagttcatgcagatgacacccttcacccgttggaggcttcgtctgtctgcgtccgcaaaagagaatgcaggattagcctttcccacggctacagcacttgactccactacccagattgtcatcactttccatgttacggccatcagacaaattgactggcggcacgacgaagag

SEQ ID NO: 200 - DNA, 2601 bp, synthetic construct
  misc_feature 1..2601: note = PtIP-83 polypeptide variant encoding sequence
  source 1..2601: mol_type = other DNA
atggctctcgtggattacggcaagcttttcgaggatctgaaccagataagcatgggtgtactggatcgggtagagttttcagaggtgatggtgatccacaggatgtatgtgaggctagctgatctgaatgtggggcagctagagggagccgagaaagtgaagcgcttgtatatttttagcgacgttatcgtgctaccagtcgtggaatggcggtggccgccgcaaataccaggatcggtgacggtgatcatattgtgtcgtcttcttcaatggccaactgatgggaggcagtcggacaccgagctccacctgacattcatgaagttgcatgccatacaacgagaggaaaatcggtgggagataaccgcagcagatggcatgaactggggagtttacatacacgcagaggaagtacaggttggcgtgctgacaatgtcatggtcttcggtacttagagtttcggcacttcgctctgttataacctccggctttcgcgccgttagtgtgtttgaggtaccgggaagtgtaaggtccacccttggagctactttaaggcccgatcacgccttatatagtacaactatgcaagccacacccaacgcatcgcatattagtgcttttaaccttcgcatagtttccccgtcggcatatcgtgtttgtcctctccaaaatgacacagatacctacttaggtattccagcagacgtggcggcagttcttccagtagacgtggtgactgatcctaacatcttgctgggcatgcagacaacggtacacattgcggagctagtcaaggcatgtcatccgtcacccgatgttgtgagcgctgtaggggagcacctgaactggctcaacaaactcttactcccacttaaggaatcgactcagttgcaaggaagcgagtcgtacaaggagtgccttgcactcttgggtcgtgttcacgctgcgatgaagatggtgagaattggcttagtagtgccccagctgcaatacagaatgtacggtagcctcatcaaccaaatggcccaagtagcacaaaactacgaccgagaattcaagcaattcaaattattcatcatccaaaatcaaatccttggcagctatttgctgcagcagaacagggcatttgctgagagggagctgcagatggagagctttcatgctgctgtcatttctcaaagaagggaggagttggacaatacattcgcaaagatggaccgattgagcgggcaaatggaggcagagagtagtgcaatggagcaagccaaaaaggaaatggacgaaggattgaggcagttccagaataggcaagttgcgaacgccctctttgccgttcttagcgctgtagctcagattgggcttgcattccttacggctggtgcaacggctcctggagctgtggcgtcggcggggcaagctgtgagcatagcaggtcaggcggcgcaaggtctgcgaagggtggtggaaattctagagcagctggaggctgtgatggaggttgtggctgctgtgaaggacctcgtggattcattggaacaggtaggtcagattgtggacgcaccggtgatgccggaattgccctcagaggcggactggtccatttttgtgaacgaggtggaggccgtggcagagggcatgccaacggaagtctcggaggttccggtgtggagggccaagtgcaagaatgtggctgcactgggtcgggagatgagcatcacggcagtacagatgtcggagctgcagtatgacatctgggtgcaaggcatgatgcgggatatggctcgaagccaggcagacaggctggccgcaattcaacccgcggaccttaccaactatttggagatggctacccagatggatatgcggactacgaggatgctgctggggctcctcaacatattgcgcatccagaatgcggcgctcaggtacgagtatcttctaatgcccacggagctcacaacatggccactgggtatggataccgtgggtgacttgctcatcgcgcaggagaatgctgcactgataggattaatgcagctagggccctcatctgatttcacgagcaggcatgtggtgaaagacatacctgtgaacttgctgctcgatggcgaggattgggagtttgagattcctgtgcaagctggcatgtccagcttcccttccagctggtctcgcgtccgtattcggcacctggagatgcactttgtgaaggaggccagcggtattggtggtgagattatccaccagcctaccacccagactgggaccgtttacatccttctgcagggttccactatcttccatgaccgcagaagagaccaggtgttgccttttcaggccgctgctccgctcaactaccattacgcgtaccgcctcgacaccggcgactccactctcacaaacgaaccctctgaacagtttgccaacaagttcatgcagatgacacccttcacccgttggaggcttcgtctgtctgcgtccgcaaaagagaatgcaggattagcctttcccacggctacagcacttgactccactacccagattgtcatcactttccatgttacggccatcagacaaattgactggcggcacgacgaagag

SEQ ID NO: 201 - DNA, 2601 bp, synthetic construct
  misc_feature 1..2601: note = PtIP-83 polypeptide variant encoding sequence
  source 1..2601: mol_type = other DNA
atggctctcgtggattacggcaagcttttcgaggatctgaaccagataagcatgggtgtactggatcgggtagagttttcagaggtgatggtgatccacaggatgtatgtgaggctagctgatctgaatgtggggcagctcgagggagccgagaaagtgaagcgcttgtatatttttaccgacgttatcgagctaccagtcgtggaatggcggtggccgccgcaaataccaggatcggtgacggtgatcatattgtgtcgtcttcttcaatggccaactgatgggaggcagtcggacaccgagctccacctgacattcatgaagttgcatgccatacaacgagaggaaaatcggtgggagataaccgcagcagatggcatgaactggggagtttacatacacgcagaggaagtacaggttggcgtgctgacaatgtcatggtcttcggtacttagagtttcggcacttcgctctgttataacctccggctttcgcgccgttagtgtgtttgaggtaccgggaagtgtaaggtccacccttggagctactttaaggcccgatcacgccttatatagtacaactatgcaagccacacccaacgcatcgcatattagtgcttttaaccttcgcatagtttccccgtcggcatatcgtgtttgtcctctccaaaatgacacagatacctacttaggtattccagcagacgtggcggcagttcttccagtagacgtggtgactgatcctaacatcttgctgggcatgcagacaacggtacacattgcggagctagtcaaggcatgtcatccgtcacccgatgttgtgagcgctgtaggggagcacctgaactggctcaacaaactcttactcccacttaaggaatcgactcagttgcaaggaagcgagtcgtacaaggagtgccttgcactcttgggtcgtgttcacgctgcgatgaagatggtgagaattggcttagtagtgccccagctgcaatacagaatgtacggtagcctcatcaaccaaatggcccaagtagcacaaaactacgaccgagaattcaagcaattcaaattattcatcatccaaaatcaaatccttggcagctatttgctgcagcagaacagggcatttgctgagagggagctgcagatggagagctttcatgctgctgtcatttctcaaagaagggaggagttggacaatacattcgcaaagatggaccgattgagcgggcaaatggaggcagagagtagtgcaatggagcaagccaaaaaggaaatggacgaaggattgaggcagttccagaataggcaagttgcgaacgccctctttgccgttcttagcgctgtagctcagattgggcttgcattccttacggctggtgcaacggctcctggagctgtggcgtcggcggggcaagctgtgagcatagcaggtcaggcggcgcaaggtctgcgaagggtggtggaaattctagagcagctggaggctgtgatggaggttgtggctgctgtgaaggacctcgtggattcattggaacaggtaggtcagattgtggacgcaccggtgatgccggaattgccctcagaggcggactggtccatttttgtgaacgaggtggaggccgtggcagagggcatgccaacggaagtctcggaggttccggtgtggagggccaagtgcaagaatgtggctgcactgggtcgggagatgagcatcacggcagtacagatgtcggagctgcagtatgacatctgggtgcaaggcatgatgcgggatatggctcgaagccaggcagacaggctggccgcaattcaacccgcggaccttaccaactatttggagatggctacccagatggatatgcggactacgaggatgctgctggggctcctcaacatattgcgcatccagaatgcggcgctcaggtacgagtatcttctaatgcccacggagctcacaacatggccactgggtatggataccgtgggtgacttgctcatcgcgcaggagaatgctgcactgataggattaatgcagctagggccctcatctgatttcacgagcaggcatgtggtgaaagacatacctgtgaacttgctgctcgatggcgaggattgggagtttgagattcctgtgcaagctggcatgtccagcttcccttccagctggtctcgcgtccgtattcggcacctggagatgcactttgtgaaggaggccagcggtattggtggtgagattatccaccagcctaccacccagactgggaccgtttacatccttctgcagggttccactatcttccatgaccgcagaagagaccaggtgttgccttttcaggccgctgctccgctcaactaccattacgcgtaccgcctcgacaccggcgactccactctcacaaacgaaccctctgaacagtttgccaacaagttcatgcagatgacacccttcacccgttggaggcttcgtctgtctgcgtccgcaaaagagaatgcaggattagcctttcccacggctacagcacttgactccactacccagattgtcatcactttccatgttacggccatcagacaaattgactggcggcacgacgaagag

SEQ ID NO: 202 - DNA, 2601 bp, synthetic construct
  misc_feature 1..2601: note = PtIP-83 polypeptide variant encoding sequence
  source 1..2601: mol_type = other DNA
atggctctcgtggattacggcaagcttttcgaggatctgaaccagataagcatgggtgtactggatcgggtagagttttcagaggtgatggtgatccacaggatgtatgtgaggctagctgatctgaatgtggggcagctcgagggagccgagaaagtgaagcgcttgtatgttttttgcgacattatcgagctaccagtcgtggaatggcggtggccgccgcaaataccaggatcggtgacggtgatcatattgtgtcgtcttcttcaatggccaactgatgggaggcagtcggacaccgagctccacctgacattcatgaagttgcatgccatacaacgagaggaaaatcggtgggagataaccgcagcagatggcatgaactggggagtttacatacacgcagaggaagtacaggttggcgtgctgacaatgtcatggtcttcggtacttagagtttcggcacttcgctctgttataacctccggctttcgcgccgttagtgtgtttgaggtaccgggaagtgtaaggtccacccttggagctactttaaggcccgatcacgccttatatagtacaactatgcaagccacacccaacgcatcgcatattagtgcttttaaccttcgcatagtttccccgtcggcatatcgtgtttgtcctctccaaaatgacacagatacctacttaggtattccagcagacgtggcggcagttcttccagtagacgtggtgactgatcctaacatcttgctgggcatgcagacaacggtacacattgcggagctagtcaaggcatgtcatccgtcacccgatgttgtgagcgctgtaggggagcacctgaactggctcaacaaactcttactcccacttaaggaatcgactcagttgcaaggaagcgagtcgtacaaggagtgccttgcactcttgggtcgtgttcacgctgcgatgaagatggtgagaattggcttagtagtgccccagctgcaatacagaatgtacggtagcctcatcaaccaaatggcccaagtagcacaaaactacgaccgagaattcaagcaattcaaattattcatcatccaaaatcaaatccttggcagctatttgctgcagcagaacagggcatttgctgagagggagctgcagatggagagctttcatgctgctgtcatttctcaaagaagggaggagttggacaatacattcgcaaagatggaccgattgagcgggcaaatggaggcagagagtagtgcaatggagcaagccaaaaaggaaatggacgaaggattgaggcagttccagaataggcaagttgcgaacgccctctttgccgttcttagcgctgtagctcagattgggcttgcattccttacggctggtgcaacggctcctggagctgtggcgtcggcggggcaagctgtgagcatagcaggtcaggcggcgcaaggtctgcgaagggtggtggaaattctagagcagctggaggctgtgatggaggttgtggctgctgtgaaggacctcgtggattcattggaacaggtaggtcagattgtggacgcaccggtgatgccggaattgccctcagaggcggactggtccatttttgtgaacgaggtggaggccgtggcagagggcatgccaacggaagtctcggaggttccggtgtggagggccaagtgcaagaatgtggctgcactgggtcgggagatgagcatcacggcagtacagatgtcggagctgcagtatgacatctgggtgcaaggcatgatgcgggatatggctcgaagccaggcagacaggctggccgcaattcaacccgcggaccttaccaactatttggagatggctacccagatggatatgcggactacgaggatgctgctggggctcctcaacatattgcgcatccagaatgcggcgctcaggtacgagtatcttctaatgcccacggagctcacaacatggccactgggtatggataccgtgggtgacttgctcatcgcgcaggagaatgctgcactgataggattaatgcagctagggccctcatctgatttcacgagcaggcatgtggtgaaagacatacctgtgaacttgctgctcgatggcgaggattgggagtttgagattcctgtgcaagctggcatgtccagcttcccttccagctggtctcgcgtccgtattcggcacctggagatgcactttgtgaaggaggccagcggtattggtggtgagattatccaccagcctaccacccagactgggaccgtttacatccttctgcagggttccactatcttccatgaccgcagaagagaccaggtgttgccttttcaggccgctgctccgctcaactaccattacgcgtaccgcctcgacaccggcgactccactctcacaaacgaaccctctgaacagtttgccaacaagttcatgcagatgacacccttcacccgttggaggcttcgtctgtctgcgtccgcaaaagagaatgcaggattagcctttcccacggctacagcacttgactccactacccagattgtcatcactttccatgttacggccatcagacaaattgactggcggcacgacgaagag

SEQ ID NO: 203 - DNA, 2601 bp, synthetic construct
  misc_feature 1..2601: note = PtIP-83 polypeptide variant encoding sequence
  source 1..2601: mol_type = other DNA
atggctctcgtggattacggcaagcttttcgaggatctgaaccagataagcatgggtgtactggatcgggtagagttttcagaggtgatggtgatccacaggatgtatgtgaggctagctgatctgaatgtggggcagctcgagggagccgagaaagtgaagcggttgtatgttttttgcgacattatcgtgctaccagtcgtggaatggcggtggccgccgcaaataccaggatcggtgacggtgatcatattgtgtcgtcttcttcaatggccaactgatgggaggcagtcggacaccgagctccacctgacattcatgaagttgcatgccatacaacgagaggaaaatcggtgggagataaccgcagcagatggcatgaactggggagtttacatacacgcagaggaagtacaggttggcgtgctgacaatgtcatggtcttcggtacttagagtttcggcacttcgctctgttataacctccggctttcgcgccgttagtgtgtttgaggtaccgggaagtgtaaggtccacccttggagctactttaaggcccgatcacgccttatatagtacaactatgcaagccacacccaacgcatcgcatattagtgcttttaaccttcgcatagtttccccgtcggcatatcgtgtttgtcctctccaaaatgacacagatacctacttaggtattccagcagacgtggcggcagttcttccagtagacgtggtgactgatcctaacatcttgctgggcatgcagacaacggtacacattgcggagctagtcaaggcatgtcatccgtcacccgatgttgtgagcgctgtaggggagcacctgaactggctcaacaaactcttactcccacttaaggaatcgactcagttgcaaggaagcgagtcgtacaaggagtgccttgcactcttgggtcgtgttcacgctgcgatgaagatggtgagaattggcttagtagtgccccagctgcaatacagaatgtacggtagcctcatcaaccaaatggcccaagtagcacaaaactacgaccgagaattcaagcaattcaaattattcatcatccaaaatcaaatccttggcagctatttgctgcagcagaacagggcatttgctgagagggagctgcagatggagagctttcatgctgctgtcatttctcaaagaagggaggagttggacaatacattcgcaaagatggaccgattgagcgggcaaatggaggcagagagtagtgcaatggagcaagccaaaaaggaaatggacgaaggattgaggcagttccagaataggcaagttgcgaacgccctctttgccgttcttagcgctgtagctcagattgggcttgcattccttacggctggtgcaacggctcctggagctgtggcgtcggcggggcaagctgtgagcatagcaggtcaggcggcgcaaggtctgcgaagggtggtggaaattctagagcagctggaggctgtgatggaggttgtggctgctgtgaaggacctcgtggattcattggaacaggtaggtcagattgtggacgcaccggtgatgccggaattgccctcagaggcggactggtccatttttgtgaacgaggtggaggccgtggcagagggcatgccaacggaagtctcggaggttccggtgtggagggccaagtgcaagaatgtggctgcactgggtcgggagatgagcatcacggcagtacagatgtcggagctgcagtatgacatctgggtgcaaggcatgatgcgggatatggctcgaagccaggcagacaggctggccgcaattcaacccgcggaccttaccaactatttggagatggctacccagatggatatgcggactacgaggatgctgctggggctcctcaacatattgcgcatccagaatgcggcgctcaggtacgagtatcttctaatgcccacggagctcacaacatggccactgggtatggataccgtgggtgacttgctcatcgcgcaggagaatgctgcactgataggattaatgcagctagggccctcatctgatttcacgagcaggcatgtggtgaaagacatacctgtgaacttgctgctcgatggcgaggattgggagtttgagattcctgtgcaagctggcatgtccagcttcccttccagctggtctcgcgtccgtattcggcacctggagatgcactttgtgaaggaggccagcggtattggtggtgagattatccaccagcctaccacccagactgggaccgtttacatccttctgcagggttccactatcttccatgaccgcagaagagaccaggtgttgccttttcaggccgctgctccgctcaactaccattacgcgtaccgcctcgacaccggcgactccactctcacaaacgaaccctctgaacagtttgccaacaagttcatgcagatgacacccttcacccgttggaggcttcgtctgtctgcgtccgcaaaagagaatgcaggattagcctttcccacggctacagcacttgactccactacccagattgtcatcactttccatgttacggccatcagacaaattgactggcggcacgacgaagag

SEQ ID NO: 204 - DNA, 2601 bp, synthetic construct
  misc_feature 1..2601: note = PtIP-83 polypeptide variant encoding sequence
  source 1..2601: mol_type = other DNA
atggctctcgtggattacggcaagcttttcgaggatctgaaccagataagcatgggtgtactggatcgggtagagttttcagaggtgatggtgatccacaggatgtatgtgaggctagctgatctgaatgtggggcagctcgagggagccgagaaagtgaagcgcttgtatgtttttggcgacattgtcgagctaccagtcgtggaatggcggtggccgccgcaaataccaggatcggtgacggtgatcatattgtgtcgtcttcttcaatggccaactgatgggaggcagtcggacaccgagctccacctgacattcatgaagttgcatgccatacaacgagaggaaaatcggtgggagataaccgcagcagatggcatgaactggggagtttacatacacgcagaggaagtacaggttggcgtgctgacaatgtcatggtcttcggtacttagagtttcggcacttcgctctgttataacctccggctttcgcgccgttagtgtgtttgaggtaccgggaagtgtaaggtccacccttggagctactttaaggcccgatcacgccttatatagtacaactatgcaagccacacccaacgcatcgcatattagtgcttttaaccttcgcatagtttccccgtcggcatatcgtgtttgtcctctccaaaatgacacagatacctacttaggtattccagcagacgtggcggcagttcttccagtagacgtggtgactgatcctaacatcttgctgggcatgcagacaacggtacacattgcggagctagtcaaggcatgtcatccgtcacccgatgttgtgagcgctgtaggggagcacctgaactggctcaacaaactcttactcccacttaaggaatcgactcagttgcaaggaagcgagtcgtacaaggagtgccttgcactcttgggtcgtgttcacgctgcgatgaagatggtgagaattggcttagtagtgccccagctgcaatacagaatgtacggtagcctcatcaaccaaatggcccaagtagcacaaaactacgaccgagaattcaagcaattcaaattattcatcatccaaaatcaaatccttggcagctatttgctgcagcagaacagggcatttgctgagagggagctgcagatggagagctttcatgctgctgtcatttctcaaagaagggaggagttggacaatacattcgcaaagatggaccgattgagcgggcaaatggaggcagagagtagtgcaatggagcaagccaaaaaggaaatggacgaaggattgaggcagttccagaataggcaagttgcgaacgccctctttgccgttcttagcgctgtagctcagattgggcttgcattccttacggctggtgcaacggctcctggagctgtggcgtcggcggggcaagctgtgagcatagcaggtcaggcggcgcaaggtctgcgaagggtggtggaaattctagagcagctggaggctgtgatggaggttgtggctgctgtgaaggacctcgtggattcattggaacaggtaggtcagattgtggacgcaccggtgatgccggaattgccctcagaggcggactggtccatttttgtgaacgaggtggaggccgtggcagagggcatgccaacggaagtctcggaggttccggtgtggagggccaagtgcaagaatgtggctgcactgggtcgggagatgagcatcacggcagtacagatgtcggagctgcagtatgacatctgggtgcaaggcatgatgcgggatatggctcgaagccaggcagacaggctggccgcaattcaacccgcggaccttaccaactatttggagatggctacccagatggatatgcggactacgaggatgctgctggggctcctcaacatattgcgcatccagaatgcggcgctcaggtacgagtatcttctaatgcccacggagctcacaacatggccactgggtatggataccgtgggtgacttgctcatcgcgcaggagaatgctgcactgataggattaatgcagctagggccctcatctgatttcacgagcaggcatgtggtgaaagacatacctgtgaacttgctgctcgatggcgaggattgggagtttgagattcctgtgcaagctggcatgtccagcttcccttccagctggtctcgcgtccgtattcggcacctggagatgcactttgtgaaggaggccagcggtattggtggtgagattatccaccagcctaccacccagactgggaccgtttacatccttctgcagggttccactatcttccatgaccgcagaagagaccaggtgttgccttttcaggccgctgctccgctcaactaccattacgcgtaccgcctcgacaccggcgactccactctcacaaacgaaccctctgaacagtttgccaacaagttcatgcagatgacacccttcacccgttggaggcttcgtctgtctgcgtccgcaaaagagaatgcaggattagcctttcccacggctacagcacttgactccactacccagattgtcatcactttccatgttacggccatcagacaaattgactggcggcacgacgaagag

SEQ ID NO: 205 - DNA, 2601 bp, synthetic construct
  misc_feature 1..2601: note = PtIP-83 polypeptide variant encoding sequence
  source 1..2601: mol_type = other DNA
atggctctcgtggattacggcaagcttttcgaggatctgaaccagataagcatgggtgtactggatcgggtagagttttcagaggtgatggtgatccacaggatgtatgtgaggctagctgatctgaatgtggggcagctcgagggagccgagaaagtgaagcgcttgtatgtttttggcgacgttgtcgagctaccagtcgtggaatggcggtggccgccgcaaataccaggatcggtgacggtgatcatattgtgtcgtcttcttcaatggccaactgatgggaggcagtcggacaccgagctccacctgacattcatgaagttgcatgccatacaacgagaggaaaatcggtgggagataaccgcagcagatggcatgaactggggagtttacatacacgcagaggaagtacaggttggcgtgctgacaatgtcatggtcttcggtacttagagtttcggcacttcgctctgttataacctccggctttcgcgccgttagtgtgtttgaggtaccgggaagtgtaaggtccacccttggagctactttaaggcccgatcacgccttatatagtacaactatgcaagccacacccaacgcatcgcatattagtgcttttaaccttcgcatagtttccccgtcggcatatcgtgtttgtcctctccaaaatgacacagatacctacttaggtattccagcagacgtggcggcagttcttccagtagacgtggtgactgatcctaacatcttgctgggcatgcagacaacggtacacattgcggagctagtcaaggcatgtcatccgtcacccgatgttgtgagcgctgtaggggagcacctgaactggctcaacaaactcttactcccacttaaggaatcgactcagttgcaaggaagcgagtcgtacaaggagtgccttgcactcttgggtcgtgttcacgctgcgatgaagatggtgagaattggcttagtagtgccccagctgcaatacagaatgtacggtagcctcatcaaccaaatggcccaagtagcacaaaactacgaccgagaattcaagcaattcaaattattcatcatccaaaatcaaatccttggcagctatttgctgcagcagaacagggcatttgctgagagggagctgcagatggagagctttcatgctgctgtcatttctcaaagaagggaggagttggacaatacattcgcaaagatggaccgattgagcgggcaaatggaggcagagagtagtgcaatggagcaagccaaaaaggaaatggacgaaggattgaggcagttccagaataggcaagttgcgaacgccctctttgccgttcttagcgctgtagctcagattgggcttgcattccttacggctggtgcaacggctcctggagctgtggcgtcggcggggcaagctgtgagcatagcaggtcaggcggcgcaaggtctgcgaagggtggtggaaattctagagcagctggaggctgtgatggaggttgtggctgctgtgaaggacctcgtggattcattggaacaggtaggtcagattgtggacgcaccggtgatgccggaattgccctcagaggcggactggtccatttttgtgaacgaggtggaggccgtggcagagggcatgccaacggaagtctcggaggttccggtgtggagggccaagtgcaagaatgtggctgcactgggtcgggagatgagcatcacggcagtacagatgtcggagctgcagtatgacatctgggtgcaaggcatgatgcgggatatggctcgaagccaggcagacaggctggccgcaattcaacccgcggaccttaccaactatttggagatggctacccagatggatatgcggactacgaggatgctgctggggctcctcaacatattgcgcatccagaatgcggcgctcaggtacgagtatcttctaatgcccacggagctcacaacatggccactgggtatggataccgtgggtgacttgctcatcgcgcaggagaatgctgcactgataggattaatgcagctagggccctcatctgatttcacgagcaggcatgtggtgaaagacatacctgtgaacttgctgctcgatggcgaggattgggagtttgagattcctgtgcaagctggcatgtccagcttcccttccagctggtctcgcgtccgtattcggcacctggagatgcactttgtgaaggaggccagcggtattggtggtgagattatccaccagcctaccacccagactgggaccgtttacatccttctgcagggttccactatcttccatgaccgcagaagagaccaggtgttgccttttcaggccgctgctccgctcaactaccattacgcgtaccgcctcgacaccggcgactccactctcacaaacgaaccctctgaacagtttgccaacaagttcatgcagatgacacccttcacccgttggaggcttcgtctgtctgcgtccgcaaaagagaatgcaggattagcctttcccacggctacagcacttgactccactacccagattgtcatcactttccatgttacggccatcagacaaattgactggcggcacgacgaagag

SEQ ID NO: 206 - DNA, 2601 bp, synthetic construct
  misc_feature 1..2601: note = PtIP-83 polypeptide variant encoding sequence
  source 1..2601: mol_type = other DNA
atggctctcgtggattacggcaagcttttcgaggatctgaaccagataagcatgggtgtactggatcgggtagagttttcagaggtgatggtgatccacaggatgtatgtgaggctagctgatctgaatgtggggcagctcgagggagccgagaaagtgaagcgcttgtatgtttttagcgacattatcgagctaccagtcgtggaatggcggtggccgccgcaaataccaggatcggtgacggtgatcatattgtgtcgtcttcttcaatggccaactgatgggaggcagtcggacaccgagctccacctgacattcatgaagttgcatgccatacaacgagaggaaaatcggtgggagataaccgcagcagatggcatgaactggggagtttacatacacgcagaggaagtacaggttggcgtgctgacaatgtcatggtcttcggtacttagagtttcggcacttcgctctgttataacctccggctttcgcgccgttagtgtgtttgaggtaccgggaagtgtaaggtccacccttggagctactttaaggcccgatcacgccttatatagtacaactatgcaagccacacccaacgcatcgcatattagtgcttttaaccttcgcatagtttccccgtcggcatatcgtgtttgtcctctccaaaatgacacagatacctacttaggtattccagcagacgtggcggcagttcttccagtagacgtggtgactgatcctaacatcttgctgggcatgcagacaacggtacacattgcggagctagtcaaggcatgtcatccgtcacccgatgttgtgagcgctgtaggggagcacctgaactggctcaacaaactcttactcccacttaaggaatcgactcagttgcaaggaagcgagtcgtacaaggagtgccttgcactcttgggtcgtgttcacgctgcgatgaagatggtgagaattggcttagtagtgccccagctgcaatacagaatgtacggtagcctcatcaaccaaatggcccaagtagcacaaaactacgaccgagaattcaagcaattcaaattattcatcatccaaaatcaaatccttggcagctatttgctgcagcagaacagggcatttgctgagagggagctgcagatggagagctttcatgctgctgtcatttctcaaagaagggaggagttggacaatacattcgcaaagatggaccgattgagcgggcaaatggaggcagagagtagtgcaatggagcaagccaaaaaggaaatggacgaaggattgaggcagttccagaataggcaagttgcgaacgccctctttgccgttcttagcgctgtagctcagattgggcttgcattccttacggctggtgcaacggctcctggagctgtggcgtcggcggggcaagctgtgagcatagcaggtcaggcggcgcaaggtctgcgaagggtggtggaaattctagagcagctggaggctgtgatggaggttgtggctgctgtgaaggacctcgtggattcattggaacaggtaggtcagattgtggacgcaccggtgatgccggaattgccctcagaggcggactggtccatttttgtgaacgaggtggaggccgtggcagagggcatgccaacggaagtctcggaggttccggtgtggagggccaagtgcaagaatgtggctgcactgggtcgggagatgagcatcacggcagtacagatgtcggagctgcagtatgacatctgggtgcaaggcatgatgcgggatatggctcgaagccaggcagacaggctggccgcaattcaacccgcggaccttaccaactatttggagatggctacccagatggatatgcggactacgaggatgctgctggggctcctcaacatattgcgcatccagaatgcggcgctcaggtacgagtatcttctaatgcccacggagctcacaacatggccactgggtatggataccgtgggtgacttgctcatcgcgcaggagaatgctgcactgataggattaatgcagctagggccctcatctgatttcacgagcaggcatgtggtgaaagacatacctgtgaacttgctgctcgatggcgaggattgggagtttgagattcctgtgcaagctggcatgtccagcttcccttccagctggtctcgcgtccgtattcggcacctggagatgcactttgtgaaggaggccagcggtattggtggtgagattatccaccagcctaccacccagactgggaccgtttacatccttctgcagggttccactatcttccatgaccgcagaagagaccaggtgttgccttttcaggccgctgctccgctcaactaccattacgcgtaccgcctcgacaccggcgactccactctcacaaacgaaccctctgaacagtttgccaacaagttcatgcagatgacacccttcacccgttggaggcttcgtctgtctgcgtccgcaaaagagaatgcaggattagcctttcccacggctacagcacttgactccactacccagattgtcatcactttccatgttacggccatcagacaaattgactggcggcacgacgaagag

SEQ ID NO: 207 - DNA, 2601 bp, synthetic construct
  misc_feature 1..2601: note = PtIP-83 polypeptide variant encoding sequence
  source 1..2601: mol_type = other DNA
atggctctcgtggattacggcaagcttttcgaggatctgaaccagataagcatgggtgtactggatcgggtagagttttcagaggtgatggtgatccacaggatgtatgtgaggctagctgatctgaatgtggggcagctcgagggagccgagaaagtgaagcgcttgtatgttttttccgacattgtcgagctaccagtcgtggaatggcggtggccgccgcaaataccaggatcggtgacggtgatcatattgtgtcgtcttcttcaatggccaactgatgggaggcagtcggacaccgagctccacctgacattcatgaagttgcatgccatacaacgagaggaaaatcggtgggagataaccgcagcagatggcatgaactggggagtttacatacacgcagaggaagtacaggttggcgtgctgacaatgtcatggtcttcggtacttagagtttcggcacttcgctctgttataacctccggctttcgcgccgttagtgtgtttgaggtaccgggaagtgtaaggtccacccttggagctactttaaggcccgatcacgccttatatagtacaactatgcaagccacacccaacgcatcgcatattagtgcttttaaccttcgcatagtttccccgtcggcatatcgtgtttgtcctctccaaaatgacacagatacctacttaggtattccagcagacgtggcggcagttcttccagtagacgtggtgactgatcctaacatcttgctgggcatgcagacaacggtacacattgcggagctagtcaaggcatgtcatccgtcacccgatgttgtgagcgctgtaggggagcacctgaactggctcaacaaactcttactcccacttaaggaatcgactcagttgcaaggaagcgagtcgtacaaggagtgccttgcactcttgggtcgtgttcacgctgcgatgaagatggtgagaattggcttagtagtgccccagctgcaatacagaatgtacggtagcctcatcaaccaaatggcccaagtagcacaaaactacgaccgagaattcaagcaattcaaattattcatcatccaaaatcaaatccttggcagctatttgctgcagcagaacagggcatttgctgagagggagctgcagatggagagctttcatgctgctgtcatttctcaaagaagggaggagttggacaatacattcgcaaagatggaccgattgagcgggcaaatggaggcagagagtagtgcaatggagcaagccaaaaaggaaatggacgaaggattgaggcagttccagaataggcaagttgcgaacgccctctttgccgttcttagcgctgtagctcagattgggcttgcattccttacggctggtgcaacggctcctggagctgtggcgtcggcggggcaagctgtgagcatagcaggtcaggcggcgcaaggtctgcgaagggtggtggaaattctagagcagctggaggctgtgatggaggttgtggctgctgtgaaggacctcgtggattcattggaacaggtaggtcagattgtggacgcaccggtgatgccggaattgccctcagaggcggactggtccatttttgtgaacgaggtggaggccgtggcagagggcatgccaacggaagtctcggaggttccggtgtggagggccaagtgcaagaatgtggctgcactgggtcgggagatgagcatcacggcagtacagatgtcggagctgcagtatgacatctgggtgcaaggcatgatgcgggatatggctcgaagccaggcagacaggctggccgcaattcaacccgcggaccttaccaactatttggagatggctacccagatggatatgcggactacgaggatgctgctggggctcctcaacatattgcgcatccagaatgcggcgctcaggtacgagtatcttctaatgcccacggagctcacaacatggccactgggtatggataccgtgggtgacttgctcatcgcgcaggagaatgctgcactgataggattaatgcagctagggccctcatctgatttcacgagcaggcatgtggtgaaagacatacctgtgaacttgctgctcgatggcgaggattgggagtttgagattcctgtgcaagctggcatgtccagcttcccttccagctggtctcgcgtccgtattcggcacctggagatgcactttgtgaaggaggccagcggtattggtggtgagattatccaccagcctaccacccagactgggaccgtttacatccttctgcagggttccactatcttccatgaccgcagaagagaccaggtgttgccttttcaggccgctgctccgctcaactaccattacgcgtaccgcctcgacaccggcgactccactctcacaaacgaaccctctgaacagtttgccaacaagttcatgcagatgacacccttcacccgttggaggcttcgtctgtctgcgtccgcaaaagagaatgcaggattagcctttcccacggctacagcacttgactccactacccagattgtcatcactttccatgttacggccatcagacaaattgactggcggcacgacgaagag

SEQ ID NO: 208 - DNA, 2601 bp, synthetic construct
  misc_feature 1..2601: note = PtIP-83 polypeptide variant encoding sequence
  source 1..2601: mol_type = other DNA
atggctctcgtggattacggcaagcttttcgaggatctgaaccagataagcatgggtgtactggatcgggtagagttttcagaggtgatggtgatccacaggatgtatgtgaggctagctgatctgaatgtggggcagctcgagggagccgagaaagtgaagcgcttgtatgttttttccgacgttatcgagctaccagtcgtggaatggcggtggccgccgcaaataccaggatcggtgacggtgatcatattgtgtcgtcttcttcaatggccaactgatgggaggcagtcggacaccgagctccacctgacattcatgaagttgcatgccatacaacgagaggaaaatcggtgggagataaccgcagcagatggcatgaactggggagtttacatacacgcagaggaagtacaggttggcgtgctgacaatgtcatggtcttcggtacttagagtttcggcacttcgctctgttataacctccggctttcgcgccgttagtgtgtttgaggtaccgggaagtgtaaggtccacccttggagctactttaaggcccgatcacgccttatatagtacaactatgcaagccacacccaacgcatcgcatattagtgcttttaaccttcgcatagtttccccgtcggcatatcgtgtttgtcctctccaaaatgacacagatacctacttaggtattccagcagacgtggcggcagttcttccagtagacgtggtgactgatcctaacatcttgctgggcatgcagacaacggtacacattgcggagctagtcaaggcatgtcatccgtcacccgatgttgtgagcgctgtaggggagcacctgaactggctcaacaaactcttactcccacttaaggaatcgactcagttgcaaggaagcgagtcgtacaaggagtgccttgcactcttgggtcgtgttcacgctgcgatgaagatggtgagaattggcttagtagtgccccagctgcaatacagaatgtacggtagcctcatcaaccaaatggcccaagtagcacaaaactacgaccgagaattcaagcaattcaaattattcatcatccaaaatcaaatccttggcagctatttgctgcagcagaacagggcatttgctgagagggagctgcagatggagagctttcatgctgctgtcatttctcaaagaagggaggagttggacaatacattcgcaaagatggaccgattgagcgggcaaatggaggcagagagtagtgcaatggagcaagccaaaaaggaaatggacgaaggattgaggcagttccagaataggcaagttgcgaacgccctctttgccgttcttagcgctgtagctcagattgggcttgcattccttacggctggtgcaacggctcctggagctgtggcgtcggcggggcaagctgtgagcatagcaggtcaggcggcgcaaggtctgcgaagggtggtggaaattctagagcagctggaggctgtgatggaggttgtggctgctgtgaaggacctcgtggattcattggaacaggtaggtcagattgtggacgcaccggtgatgccggaattgccctcagaggcggactggtccatttttgtgaacgaggtggaggccgtggcagagggcatgccaacggaagtctcggaggttccggtgtggagggccaagtgcaagaatgtggctgcactgggtcgggagatgagcatcacggcagtacagatgtcggagctgcagtatgacatctgggtgcaaggcatgatgcgggatatggctcgaagccaggcagacaggctggccgcaattcaacccgcggaccttaccaactatttggagatggctacccagatggatatgcggactacgaggatgctgctggggctcctcaacatattgcgcatccagaatgcggcgctcaggtacgagtatcttctaatgcccacggagctcacaacatggccactgggtatggataccgtgggtgacttgctcatcgcgcaggagaatgctgcactgataggattaatgcagctagggccctcatctgatttcacgagcaggcatgtggtgaaagacatacctgtgaacttgctgctcgatggcgaggattgggagtttgagattcctgtgcaagctggcatgtccagcttcccttccagctggtctcgcgtccgtattcggcacctggagatgcactttgtgaaggaggccagcggtattggtggtgagattatccaccagcctaccacccagactgggaccgtttacatccttctgcagggttccactatcttccatgaccgcagaagagaccaggtgttgccttttcaggccgctgctccgctcaactaccattacgcgtaccgcctcgacaccggcgactccactctcacaaacgaaccctctgaacagtttgccaacaagttcatgcagatgacacccttcacccgttggaggcttcgtctgtctgcgtccgcaaaagagaatgcaggattagcctttcccacggctacagcacttgactccactacccagattgtcatcactttccatgttacggccatcagacaaattgactggcggcacgacgaagag

SEQ ID NO: 209 - DNA, 2601 bp, synthetic construct
  misc_feature 1..2601: note = PtIP-83 polypeptide variant encoding sequence
  source 1..2601: mol_type = other DNA
atggctctcgtggattacggcaagcttttcgaggatctgaaccagataagcatgggtgtactggatcgggtagagttttcagaggtgatggtgatccacaggatgtatgtgaggctagctgatctgaatgtggggcagctcgagggagccgagaaagtgaagcgcttgtatgtttttaccgacgttatcgtgctaccagtcgtggaatggcggtggccgccgcaaataccaggatcggtgacggtgatcatattgtgtcgtcttcttcaatggccaactgatgggaggcagtcggacaccgagctccacctgacattcatgaagttgcatgccatacaacgagaggaaaatcggtgggagataaccgcagcagatggcatgaactggggagtttacatacacgcagaggaagtacaggttggcgtgctgacaatgtcatggtcttcggtacttagagtttcggcacttcgctctgttataacctccggctttcgcgccgttagtgtgtttgaggtaccgggaagtgtaaggtccacccttggagctactttaaggcccgatcacgccttatatagtacaactatgcaagccacacccaacgcatcgcatattagtgcttttaaccttcgcatagtttccccgtcggcatatcgtgtttgtcctctccaaaatgacacagatacctacttaggtattccagcagacgtggcggcagttcttccagtagacgtggtgactgatcctaacatcttgctgggcatgcagacaacggtacacattgcggagctagtcaaggcatgtcatccgtcacccgatgttgtgagcgctgtaggggagcacctgaactggctcaacaaactcttactcccacttaaggaatcgactcagttgcaaggaagcgagtcgtacaaggagtgccttgcactcttgggtcgtgttcacgctgcgatgaagatggtgagaattggcttagtagtgccccagctgcaatacagaatgtacggtagcctcatcaaccaaatggcccaagtagcacaaaactacgaccgagaattcaagcaattcaaattattcatcatccaaaatcaaatccttggcagctatttgctgcagcagaacagggcatttgctgagagggagctgcagatggagagctttcatgctgctgtcatttctcaaagaagggaggagttggacaatacattcgcaaagatggaccgattgagcgggcaaatggaggcagagagtagtgcaatggagcaagccaaaaaggaaatggacgaaggattgaggcagttccagaataggcaagttgcgaacgccctctttgccgttcttagcgctgtagctcagattgggcttgcattccttacggctggtgcaacggctcctggagctgtggcgtcggcggggcaagctgtgagcatagcaggtcaggcggcgcaaggtctgcgaagggtggtggaaattctagagcagctggaggctgtgatggaggttgtggctgctgtgaaggacctcgtggattcattggaacaggtaggtcagattgtggacgcaccggtgatgccggaattgccctcagaggcggactggtccatttttgtgaacgaggtggaggccgtggcagagggcatgccaacggaagtctcggaggttccggtgtggagggccaagtgcaagaatgtggctgcactgggtcgggagatgagcatcacggcagtacagatgtcggagctgcagtatgacatctgggtgcaaggcatgatgcgggatatggctcgaagccaggcagacaggctggccgcaattcaacccgcggaccttaccaactatttggagatggctacccagatggatatgcggactacgaggatgctgctggggctcctcaacatattgcgcatccagaatgcggcgctcaggtacgagtatcttctaatgcccacggagctcacaacatggccactgggtatggataccgtgggtgacttgctcatcgcgcaggagaatgctgcactgataggattaatgcagctagggccctcatctgatttcacgagcaggcatgtggtgaaagacatacctgtgaacttgctgctcgatggcgaggattgggagtttgagattcctgtgcaagctggcatgtccagcttcccttccagctggtctcgcgtccgtattcggcacctggagatgcactttgtgaaggaggccagcggtattggtggtgagattatccaccagcctaccacccagactgggaccgtttacatccttctgcagggttccactatcttccatgaccgcagaagagaccaggtgttgccttttcaggccgctgctccgctcaactaccattacgcgtaccgcctcgacaccggcgactccactctcacaaacgaaccctctgaacagtttgccaacaagttcatgcagatgacacccttcacccgttggaggcttcgtctgtctgcgtccgcaaaagagaatgcaggattagcctttcccacggctacagcacttgactccactacccagattgtcatcactttccatgttacggccatcagacaaattgactggcggcacgacgaagag

SEQ ID NO: 210 - DNA, 2601 bp, synthetic construct
  misc_feature 1..2601: note = PtIP-83 polypeptide variant encoding sequence
  source 1..2601: mol_type = other DNA
atggctctcgtggattacggcaagcttttcgaggatctgaaccagataagcatgggtgtactggatcgggtagagttttcagaggtgatggtgatccacaggatgtatgtgaggctagctgatctgaatgtggggcagctcgagggagccgagaaagtgaagcgcttgtatgtttttaccgacgttgtcgtgctaccagtcgtggaatggcggtggccgccgcaaataccaggatcggtgacggtgatcatattgtgtcgtcttcttcaatggccaactgatgggaggcagtcggacaccgagctccacctgacattcatgaagttgcatgccatacaacgagaggaaaatcggtgggagataaccgcagcagatggcatgaactggggagtttacatacacgcagaggaagtacaggttggcgtgctgacaatgtcatggtcttcggtacttagagtttcggcacttcgctctgttataacctccggctttcgcgccgttagtgtgtttgaggtaccgggaagtgtaaggtccacccttggagctactttaaggcccgatcacgccttatatagtacaactatgcaagccacacccaacgcatcgcatattagtgcttttaaccttcgcatagtttccccgtcggcatatcgtgtttgtcctctccaaaatgacacagatacctacttaggtattccagcagacgtggcggcagttcttccagtagacgtggtgactgatcctaacatcttgctgggcatgcagacaacggtacacattgcggagctagtcaaggcatgtcatccgtcacccgatgttgtgagcgctgtaggggagcacctgaactggctcaacaaactcttactcccacttaaggaatcgactcagttgcaaggaagcgagtcgtacaaggagtgccttgcactcttgggtcgtgttcacgctgcgatgaagatggtgagaattggcttagtagtgccccagctgcaatacagaatgtacggtagcctcatcaaccaaatggcccaagtagcacaaaactacgaccgagaattcaagcaattcaaattattcatcatccaaaatcaaatccttggcagctatttgctgcagcagaacagggcatttgctgagagggagctgcagatggagagctttcatgctgctgtcatttctcaaagaagggaggagttggacaatacattcgcaaagatggaccgattgagcgggcaaatggaggcagagagtagtgcaatggagcaagccaaaaaggaaatggacgaaggattgaggcagttccagaataggcaagttgcgaacgccctctttgccgttcttagcgctgtagctcagattgggcttgcattccttacggctggtgcaacggctcctggagctgtggcgtcggcggggcaagctgtgagcatagcaggtcaggcggcgcaaggtctgcgaagggtggtggaaattctagagcagctggaggctgtgatggaggttgtggctgctgtgaaggacctcgtggattcattggaacaggtaggtcagattgtggacgcaccggtgatgccggaattgccctcagaggcggactggtccatttttgtgaacgaggtggaggccgtggcagagggcatgccaacggaagtctcggaggttccggtgtggagggccaagtgcaagaatgtggctgcactgggtcgggagatgagcatcacggcagtacagatgtcggagctgcagtatgacatctgggtgcaaggcatgatgcgggatatggctcgaagccaggcagacaggctggccgcaattcaacccgcggaccttaccaactatttggagatggctacccagatggatatgcggactacgaggatgctgctggggctcctcaacatattgcgcatccagaatgcggcgctcaggtacgagtatcttctaatgcccacggagctcacaacatggccactgggtatggataccgtgggtgacttgctcatcgcgcaggagaatgctgcactgataggattaatgcagctagggccctcatctgatttcacgagcaggcatgtggtgaaagacatacctgtgaacttgctgctcgatggcgaggattgggagtttgagattcctgtgcaagctggcatgtccagcttcccttccagctggtctcgcgtccgtattcggcacctggagatgcactttgtgaaggaggccagcggtattggtggtgagattatccaccagcctaccacccagactgggaccgtttacatccttctgcagggttccactatcttccatgaccgcagaagagaccaggtgttgccttttcaggccgctgctccgctcaactaccattacgcgtaccgcctcgacaccggcgactccactctcacaaacgaaccctctgaacagtttgccaacaagttcatgcagatgacacccttcacccgttggaggcttcgtctgtctgcgtccgcaaaagagaatgcaggattagcctttcccacggctacagcacttgactccactacccagattgtcatcactttccatgttacggccatcagacaaattgactggcggcacgacgaagag

SEQ ID NO: 211 - DNA, 2601 bp, synthetic construct
  misc_feature 1..2601: note = PtIP-83 polypeptide variant encoding sequence
  source 1..2601: mol_type = other DNA
atggctctcgtggattacggcaagcttttcgaggatctgaaccagataagcatgggtgtactggatcgggtagagttttcagaggtgatggtgatccacaggatgtatgtgaggctagctgatctgaatgtggggcagctcgagggagccgagaaagtgatgcacttgtatatttttgccgacgttatcgagctaccagtcgtggaatggcggtggccgccgcaaataccaggatcggtgacggtgatcatattgtgtcgtcttcttcaatggccaactgatgggaggcagtcggacaccgagctccacctgacattcatgaagttgcatgccatacaacgagaggaaaatcggtgggagataaccgcagcagatggcatgaactggggagtttacatacacgcagaggaagtacaggttggcgtgctgacaatgtcatggtcttcggtacttagagtttcggcacttcgctctgttataacctccggctttcgcgccgttagtgtgtttgaggtaccgggaagtgtaaggtccacccttggagctactttaaggcccgatcacgccttatatagtacaactatgcaagccacacccaacgcatcgcatattagtgcttttaaccttcgcatagtttccccgtcggcatatcgtgtttgtcctctccaaaatgacacagatacctacttaggtattccagcagacgtggcggcagttcttccagtagacgtggtgactgatcctaacatcttgctgggcatgcagacaacggtacacattgcggagctagtcaaggcatgtcatccgtcacccgatgttgtgagcgctgtaggggagcacctgaactggctcaacaaactcttactcccacttaaggaatcgactcagttgcaaggaagcgagtcgtacaaggagtgccttgcactcttgggtcgtgttcacgctgcgatgaagatggtgagaattggcttagtagtgccccagctgcaatacagaatgtacggtagcctcatcaaccaaatggcccaagtagcacaaaactacgaccgagaattcaagcaattcaaattattcatcatccaaaatcaaatccttggcagctatttgctgcagcagaacagggcatttgctgagagggagctgcagatggagagctttcatgctgctgtcatttctcaaagaagggaggagttggacaatacattcgcaaagatggaccgattgagcgggcaaatggaggcagagagtagtgcaatggagcaagccaaaaaggaaatggacgaaggattgaggcagttccagaataggcaagttgcgaacgccctctttgccgttcttagcgctgtagctcagattgggcttgcattccttacggctggtgcaacggctcctggagctgtggcgtcggcggggcaagctgtgagcatagcaggtcaggcggcgcaaggtctgcgaagggtggtggaaattctagagcagctggaggctgtgatggaggttgtggctgctgtgaaggacctcgtggattcattggaacaggtaggtcagattgtggacgcaccggtgatgccggaattgccctcagaggcggactggtccatttttgtgaacgaggtggaggccgtggcagagggcatgccaacggaagtctcggaggttccggtgtggagggccaagtgcaagaatgtggctgcactgggtcgggagatgagcatcacggcagtacagatgtcggagctgcagtatgacatctgggtgcaaggcatgatgcgggatatggctcgaagccaggcagacaggctggccgcaattcaacccgcggaccttaccaactatttggagatggctacccagatggatatgcggactacgaggatgctgctggggctcctcaacatattgcgcatccagaatgcggcgctcaggtacgagtatcttctaatgcccacggagctcacaacatggccactgggtatggataccgtgggtgacttgctcatcgcgcaggagaatgctgcactgataggattaatgcagctagggccctcatctgatttcacgagcaggcatgtggtgaaagacatacctgtgaacttgctgctcgatggcgaggattgggagtttgagattcctgtgcaagctggcatgtccagcttcccttccagctggtctcgcgtccgtattcggcacctggagatgcactttgtgaaggaggccagcggtattggtggtgagattatccaccagcctaccacccagactgggaccgtttacatccttctgcagggttccactatcttccatgaccgcagaagagaccaggtgttgccttttcaggccgctgctccgctcaactaccattacgcgtaccgcctcgacaccggcgactccactctcacaaacgaaccctctgaacagtttgccaacaagttcatgcagatgacacccttcacccgttggaggcttcgtctgtctgcgtccgcaaaagagaatgcaggattagcctttcccacggctacagcacttgactccactacccagattgtcatcactttccatgttacggccatcagacaaattgactggcggcacgacgaagag

SEQ ID NO: 212 - DNA, 2601 bp, synthetic construct
  misc_feature 1..2601: note = PtIP-83 polypeptide variant encoding sequence
  source 1..2601: mol_type = other DNA
atggctctcgtggattacggcaagcttttcgaggatctgaaccagataagcatgggtgtactggatcgggtagagttttcagaggtgatggtgatccacaggatgtatgtgaggctagctgatctgaatgtggggcagctcgagggagccgagaaagtgatgcagttgtatattttttgcgacattctcgagctaccagtcgtggaatggcggtggccgacgcaaataccaggatcggtgacggtgatcatattgtgtcgtcttcttcaatggccaactgatgggaggcagtcggacaccgagctccacctgacattcatgaagttgcatgccatacaacgagaggaaaatcggtgggagataaccgcagcagatggcatgaactggggagtttacatacacgcagaggaagtacaggttggcgtgctgacaatgtcatggtcttcggtacttagagtttcggcacttcgctctgttataacctccggctttcgcgccgttagtgtgtttgaggtaccgggaagtgtaaggtccacccttggagctactttaaggcccgatcacgccttatatagtacaactatgcaagccacacccaacgcatcgcatattagtgcttttaaccttcgcatagtttccccgtcggcatatcgtgtttgtcctctccaaaatgacacagatacctacttaggtattccagcagacgtggcggcagttcttccagtagacgtggtgactgatcctaacatcttgctgggcatgcagacaacggtacacattgcggagctagtcaaggcatgtcatccgtcacccgatgttgtgagcgctgtaggggagcacctgaactggctcaacaaactcttactcccacttaaggaatcgactcagttgcaaggaagcgagtcgtacaaggagtgccttgcactcttgggtcgtgttcacgctgcgatgaagatggtgagaattggcttagtagtgccccagctgcaatacagaatgtacggtagcctcatcaaccaaatggcccaagtagcacaaaactacgaccgagaattcaagcaattcaaattattcatcatccaaaatcaaatccttggcagctatttgctgcagcagaacagggcatttgctgagagggagctgcagatggagagctttcatgctgctgtcatttctcaaagaagggaggagttggacaatacattcgcaaagatggaccgattgagcgggcaaatggaggcagagagtagtgcaatggagcaagccaaaaaggaaatggacgaaggattgaggcagttccagaataggcaagttgcgaacgccctctttgccgttcttagcgctgtagctcagattgggcttgcattccttacggctggtgcaacggctcctggagctgtggcgtcggcggggcaagctgtgagcatagcaggtcaggcggcgcaaggtctgcgaagggtggtggaaattctagagcagctggaggctgtgatggaggttgtggctgctgtgaaggacctcgtggattcattggaacaggtaggtcagattgtggacgcaccggtgatgccggaattgccctcagaggcggactggtccatttttgtgaacgaggtggaggccgtggcagagggcatgccaacggaagtctcggaggttccggtgtggagggccaagtgcaagaatgtggctgcactgggtcgggagatgagcatcacggcagtacagatgtcggagctgcagtatgacatctgggtgcaaggcatgatgcgggatatggctcgaagccaggcagacaggctggccgcaattcaacccgcggaccttaccaactatttggagatggctacccagatggatatgcggactacgaggatgctgctggggctcctcaacatattgcgcatccagaatgcggcgctcaggtacgagtatcttctaatgcccacggagctcacaacatggccactgggtatggataccgtgggtgacttgctcatcgcgcaggagaatgctgcactgataggattaatgcagctagggccctcatctgatttcacgagcaggcatgtggtgaaagacatacctgtgaacttgctgctcgatggcgaggattgggagtttgagattcctgtgcaagctggcatgtccagcttcccttccagctggtctcgcgtccgtattcggcacctggagatgcactttgtgaaggaggccagcggtattggtggtgagattatccaccagcctaccacccagactgggaccgtttacatccttctgcagggttccactatcttccatgaccgcagaagagaccaggtgttgccttttcaggccgctgctccgctcaactaccattacgcgtaccgcctcgacaccggcgactccactctcacaaacgaaccctctgaacagtttgccaacaagttcatgcagatgacacccttcacccgttggaggcttcgtctgtctgcgtccgcaaaagagaatgcaggattagcctttcccacggctacagcacttgactccactacccagattgtcatcactttccatgttacggccatcagacaaattgactggcggcacgacgaagag

SEQ ID NO: 213 - DNA, 2601 bp, synthetic construct
  misc_feature 1..2601: note = PtIP-83 polypeptide variant encoding sequence
  source 1..2601: mol_type = other DNA
atggctctcgtggattacggcaagcttttcgaggatctgaaccagataagcatgggtgtactggatcgggtagagttttcagaggtgatggtgatccacaggatgtatgtgaggctagctgatctgaatgtggggcagctcgagggagccgagaaagtgatgcgcttgtatatttttgccgacgttgtcgtgctaccagtcgtggaatggcggtggccgccgcaaataccaggatcggtgacggtgatcatattgtgtcgtcttcttcaatggccaactgatgggaggcagtcggacaccgagctccacctgacattcatgaagttgcatgccatacaacgagaggaaaatcggtgggagataaccgcagcagatggcatgaactggggagtttacatacacgcagaggaagtacaggttggcgtgctgacaatgtcatggtcttcggtacttagagtttcggcacttcgctctgttataacctccggctttcgcgccgttagtgtgtttgaggtaccgggaagtgtaaggtccacccttggagctactttaaggcccgatcacgccttatatagtacaactatgcaagccacacccaacgcatcgcatattagtgcttttaaccttcgcatagtttccccgtcggcatatcgtgtttgtcctctccaaaatgacacagatacctacttaggtattccagcagacgtggcggcagttcttccagtagacgtggtgactgatcctaacatcttgctgggcatgcagacaacggtacacattgcggagctagtcaaggcatgtcatccgtcacccgatgttgtgagcgctgtaggggagcacctgaactggctcaacaaactcttactcccacttaaggaatcgactcagttgcaaggaagcgagtcgtacaaggagtgccttgcactcttgggtcgtgttcacgctgcgatgaagatggtgagaattggcttagtagtgccccagctgcaatacagaatgtacggtagcctcatcaaccaaatggcccaagtagcacaaaactacgaccgagaattcaagcaattcaaattattcatcatccaaaatcaaatccttggcagctatttgctgcagcagaacagggcatttgctgagagggagctgcagatggagagctttcatgctgctgtcatttctcaaagaagggaggagttggacaatacattcgcaaagatggaccgattgagcgggcaaatggaggcagagagtagtgcaatggagcaagccaaaaaggaaatggacgaaggattgaggcagttccagaataggcaagttgcgaacgccctctttgccgttcttagcgctgtagctcagattgggcttgcattccttacggctggtgcaacggctcctggagctgtggcgtcggcggggcaagctgtgagcatagcaggtcaggcggcgcaaggtctgcgaagggtggtggaaattctagagcagctggaggctgtgatggaggttgtggctgctgtgaaggacctcgtggattcattggaacaggtaggtcagattgtggacgcaccggtgatgccggaattgccctcagaggcggactggtccatttttgtgaacgaggtggaggccgtggcagagggcatgccaacggaagtctcggaggttccggtgtggagggccaagtgcaagaatgtggctgcactgggtcgggagatgagcatcacggcagtacagatgtcggagctgcagtatgacatctgggtgcaaggcatgatgcgggatatggctcgaagccaggcagacaggctggccgcaattcaacccgcggaccttaccaactatttggagatggctacccagatggatatgcggactacgaggatgctgctggggctcctcaacatattgcgcatccagaatgcggcgctcaggtacgagtatcttctaatgcccacggagctcacaacatggccactgggtatggataccgtgggtgacttgctcatcgcgcaggagaatgctgcactgataggattaatgcagctagggccctcatctgatttcacgagcaggcatgtggtgaaagacatacctgtgaacttgctgctcgatggcgaggattgggagtttgagattcctgtgcaagctggcatgtccagcttcccttccagctggtctcgcgtccgtattcggcacctggagatgcactttgtgaaggaggccagcggtattggtggtgagattatccaccagcctaccacccagactgggaccgtttacatccttctgcagggttccactatcttccatgaccgcagaagagaccaggtgttgccttttcaggccgctgctccgctcaactaccattacgcgtaccgcctcgacaccggcgactccactctcacaaacgaaccctctgaacagtttgccaacaagttcatgcagatgacacccttcacccgttggaggcttcgtctgtctgcgtccgcaaaagagaatgcaggattagcctttcccacggctacagcacttgactccactacccagattgtcatcactttccatgttacggccatcagacaaattgactggcggcacgacgaagag

SEQ ID NO: 214 - DNA, 2601 bp, synthetic construct
  misc_feature 1..2601: note = PtIP-83 polypeptide variant encoding sequence
  source 1..2601: mol_type = other DNA
atggctctcgtggattacggcaagcttttcgaggatctgaaccagataagcatgggtgtactggatcgggtagagttttcagaggtgatggtgatccacaggatgtatgtgaggctagctgatctgaatgtggggcagctcgagggagccgagaaagtgatgcgcttgtatattttttgcgacgttatcgagctaccagtcgtggaatggcggtggccgccgcaaataccaggatcggtgacggtgatcatattgtgtcgtcttcttcaatggccaactgatgggaggcagtcggacaccgagctccacctgacattcatgaagttgcatgccatacaacgagaggaaaatcggtgggagataaccgcagcagatggcatgaactggggagtttacatacacgcagaggaagtacaggttggcgtgctgacaatgtcatggtcttcggtacttagagtttcggcacttcgctctgttataacctccggctttcgcgccgttagtgtgtttgaggtaccgggaagtgtaaggtccacccttggagctactttaaggcccgatcacgccttatatagtacaactatgcaagccacacccaacgcatcgcatattagtgcttttaaccttcgcatagtttccccgtcggcatatcgtgtttgtcctctccaaaatgacacagatacctacttaggtattccagcagacgtggcggcagttcttccagtagacgtggtgactgatcctaacatcttgctgggcatgcagacaacggtacacattgcggagctagtcaaggcatgtcatccgtcacccgatgttgtgagcgctgtaggggagcacctgaactggctcaacaaactcttactcccacttaaggaatcgactcagttgcaaggaagcgagtcgtacaaggagtgccttgcactcttgggtcgtgttcacgctgcgatgaagatggtgagaattggcttagtagtgccccagctgcaatacagaatgtacggtagcctcatcaaccaaatggcccaagtagcacaaaactacgaccgagaattcaagcaattcaaattattcatcatccaaaatcaaatccttggcagctatttgctgcagcagaacagggcatttgctgagagggagctgcagatggagagctttcatgctgctgtcatttctcaaagaagggaggagttggacaatacattcgcaaagatggaccgattgagcgggcaaatggaggcagagagtagtgcaatggagcaagccaaaaaggaaatggacgaaggattgaggcagttccagaataggcaagttgcgaacgccctctttgccgttcttagcgctgtagctcagattgggcttgcattccttacggctggtgcaacggctcctggagctgtggcgtcggcggggcaagctgtgagcatagcaggtcaggcggcgcaaggtctgcgaagggtggtggaaattctagagcagctggaggctgtgatggaggttgtggctgctgtgaaggacctcgtggattcattggaacaggtaggtcagattgtggacgcaccggtgatgccggaattgccctcagaggcggactggtccatttttgtgaacgaggtggaggccgtggcagagggcatgccaacggaagtctcggaggttccggtgtggagggccaagtgcaagaatgtggctgcactgggtcgggagatgagcatcacggcagtacagatgtcggagctgcagtatgacatctgggtgcaaggcatgatgcgggatatggctcgaagccaggcagacaggctggccgcaattcaacccgcggaccttaccaactatttggagatggctacccagatggatatgcggactacgaggatgctgctggggctcctcaacatattgcgcatccagaatgcggcgctcaggtacgagtatcttctaatgcccacggagctcacaacatggccactgggtatggataccgtgggtgacttgctcatcgcgcaggagaatgctgcactgataggattaatgcagctagggccctcatctgatttcacgagcaggcatgtggtgaaagacatacctgtgaacttgctgctcgatggcgaggattgggagtttgagattcctgtgcaagctggcatgtccagcttcccttccagctggtctcgcgtccgtattcggcacctggagatgcactttgtgaaggaggccagcggtattggtggtgagattatccaccagcctaccacccagactgggaccgtttacatccttctgcagggttccactatcttccatgaccgcagaagagaccaggtgttgccttttcaggccgctgctccgctcaactaccattacgcgtaccgcctcgacaccggcgactccactctcacaaacgaaccctctgaacagtttgccaacaagttcatgcagatgacacccttcacccgttggaggcttcgtctgtctgcgtccgcaaaagagaatgcaggattagcctttcccacggctacagcacttgactccactacccagattgtcatcactttccatgttacggccatcagacaaattgactggcggcacgacgaagag

SEQ ID NO: 215 - DNA, 2601 bp, synthetic construct
  misc_feature 1..2601: note = PtIP-83 polypeptide variant encoding sequence
  source 1..2601: mol_type = other DNA
atggctctcgtggattacggcaagcttttcgaggatctgaaccagataagcatgggtgtactggatcgggtagagttttcagaggtgatggtgatccacaggatgtatgtgaggctagctgatctgaatgtggggcagctcgagggagccgagaaagtgatgcgcttgtatgttttttgcgacattatcgagctaccagtcgtggaatggcggtggccgccgcaaataccaggatcggtgacggtgatcatattgtgtcgtcttcttcaatggccaactgatgggaggcagtcggacaccgagctccacctgacattcatgaagttgcatgccatacaacgagaggaaaatcggtgggagataaccgcagcagatggcatgaactggggagtttacatacacgcagaggaagtacaggttggcgtgctgacaatgtcatggtcttcggtacttagagtttcggcacttcgctctgttataacctccggctttcgcgccgttagtgtgtttgaggtaccgggaagtgtaaggtccacccttggagctactttaaggcccgatcacgccttatatagtacaactatgcaagccacacccaacgcatcgcatattagtgcttttaaccttcgcatagtttccccgtcggcatatcgtgtttgtcctctccaaaatgacacagatacctacttaggtattccagcagacgtggcggcagttcttccagtagacgtggtgactgatcctaacatcttgctgggcatgcagacaacggtacacattgcggagctagtcaaggcatgtcatccgtcacccgatgttgtgagcgctgtaggggagcacctgaactggctcaacaaactcttactcccacttaaggaatcgactcagttgcaaggaagcgagtcgtacaaggagtgccttgcactcttgggtcgtgttcacgctgcgatgaagatggtgagaattggcttagtagtgccccagctgcaatacagaatgtacggtagcctcatcaaccaaatggcccaagtagcacaaaactacgaccgagaattcaagcaattcaaattattcatcatccaaaatcaaatccttggcagctatttgctgcagcagaacagggcatttgctgagagggagctgcagatggagagctttcatgctgctgtcatttctcaaagaagggaggagttggacaatacattcgcaaagatggaccgattgagcgggcaaatggaggcagagagtagtgcaatggagcaagccaaaaaggaaatggacgaaggattgaggcagttccagaataggcaagttgcgaacgccctctttgccgttcttagcgctgtagctcagattgggcttgcattccttacggctggtgcaacggctcctggagctgtggcgtcggcggggcaagctgtgagcatagcaggtcaggcggcgcaaggtctgcgaagggtggtggaaattctagagcagctggaggctgtgatggaggttgtggctgctgtgaaggacctcgtggattcattggaacaggtaggtcagattgtggacgcaccggtgatgccggaattgccctcagaggcggactggtccatttttgtgaacgaggtggaggccgtggcagagggcatgccaacggaagtctcggaggttccggtgtggagggccaagtgcaagaatgtggctgcactgggtcgggagatgagcatcacggcagtacagatgtcggagctgcagtatgacatctgggtgcaaggcatgatgcgggatatggctcgaagccaggcagacaggctggccgcaattcaacccgcggaccttaccaactatttggagatggctacccagatggatatgcggactacgaggatgctgctggggctcctcaacatattgcgcatccagaatgcggcgctcaggtacgagtatcttctaatgcccacggagctcacaacatggccactgggtatggataccgtgggtgacttgctcatcgcgcaggagaatgctgcactgataggattaatgcagctagggccctcatctgatttcacgagcaggcatgtggtgaaagacatacctgtgaacttgctgctcgatggcgaggattgggagtttgagattcctgtgcaagctggcatgtccagcttcccttccagctggtctcgcgtccgtattcggcacctggagatgcactttgtgaaggaggccagcggtattggtggtgagattatccaccagcctaccacccagactgggaccgtttacatccttctgcagggttccactatcttccatgaccgcagaagagaccaggtgttgccttttcaggccgctgctccgctcaactaccattacgcgtaccgcctcgacaccggcgactccactctcacaaacgaaccctctgaacagtttgccaacaagttcatgcagatgacacccttcacccgttggaggcttcgtctgtctgcgtccgcaaaagagaatgcaggattagcctttcccacggctacagcacttgactccactacccagattgtcatcactttccatgttacggccatcagacaaattgactggcggcacgacgaagag

SEQ ID NO: 216 - DNA, 2601 bp, synthetic construct
  misc_feature 1..2601: note = PtIP-83 polypeptide variant encoding sequence
  source 1..2601: mol_type = other DNA
atggctctcgtggattacggcaagcttttcgaggatctgaaccagataagcatgggtgtactggatcgggtagagttttcagaggtgatggtgatccacaggatgtatgtgaggctagctgatctgaatgtggggcagctcgagggagccgagaaagtgatgcggttgtatgttttttgcgacattctcgtgctaccagtcgtggaatggcggtggccgccgcaaataccaggatcggtgacggtgatcatattgtgtcgtcttcttcaatggccaactgatgggaggcagtcggacaccgagctccacctgacattcatgaagttgcatgccatacaacgagaggaaaatcggtgggagataaccgcagcagatggcatgaactggggagtttacatacacgcagaggaagtacaggttggcgtgctgacaatgtcatggtcttcggtacttagagtttcggcacttcgctctgttataacctccggctttcgcgccgttagtgtgtttgaggtaccgggaagtgtaaggtccacccttggagctactttaaggcccgatcacgccttatatagtacaactatgcaagccacacccaacgcatcgcatattagtgcttttaaccttcgcatagtttccccgtcggcatatcgtgtttgtcctctccaaaatgacacagatacctacttaggtattccagcagacgtggcggcagttcttccagtagacgtggtgactgatcctaacatcttgctgggcatgcagacaacggtacacattgcggagctagtcaaggcatgtcatccgtcacccgatgttgtgagcgctgtaggggagcacctgaactggctcaacaaactcttactcccacttaaggaatcgactcagttgcaaggaagcgagtcgtacaaggagtgccttgcactcttgggtcgtgttcacgctgcgatgaagatggtgagaattggcttagtagtgccccagctgcaatacagaatgtacggtagcctcatcaaccaaatggcccaagtagcacaaaactacgaccgagaattcaagcaattcaaattattcatcatccaaaatcaaatccttggcagctatttgctgcagcagaacagggcatttgctgagagggagctgcagatggagagctttcatgctgctgtcatttctcaaagaagggaggagttggacaatacattcgcaaagatggaccgattgagcgggcaaatggaggcagagagtagtgcaatggagcaagccaaaaaggaaatggacgaaggattgaggcagttccagaataggcaagttgcgaacgccctctttgccgttcttagcgctgtagctcagattgggcttgcattccttacggctggtgcaacggctcctggagctgtggcgtcggcggggcaagctgtgagcatagcaggtcaggcggcgcaaggtctgcgaagggtggtggaaattctagagcagctggaggctgtgatggaggttgtggctgctgtgaaggacctcgtggattcattggaacaggtaggtcagattgtggacgcaccggtgatgccggaattgccctcagaggcggactggtccatttttgtgaacgaggtggaggccgtggcagagggcatgccaacggaagtctcggaggttccggtgtggagggccaagtgcaagaatgtggctgcactgggtcgggagatgagcatcacggcagtacagatgtcggagctgcagtatgacatctgggtgcaaggcatgatgcgggatatggctcgaagccaggcagacaggctggccgcaattcaacccgcggaccttaccaactatttggagatggctacccagatggatatgcggactacgaggatgctgctggggctcctcaacatattgcgcatccagaatgcggcgctcaggtacgagtatcttctaatgcccacggagctcacaacatggccactgggtatggataccgtgggtgacttgctcatcgcgcaggagaatgctgcactgataggattaatgcagctagggccctcatctgatttcacgagcaggcatgtggtgaaagacatacctgtgaacttgctgctcgatggcgaggattgggagtttgagattcctgtgcaagctggcatgtccagcttcccttccagctggtctcgcgtccgtattcggcacctggagatgcactttgtgaaggaggccagcggtattggtggtgagattatccaccagcctaccacccagactgggaccgtttacatccttctgcagggttccactatcttccatgaccgcagaagagaccaggtgttgccttttcaggccgctgctccgctcaactaccattacgcgtaccgcctcgacaccggcgactccactctcacaaacgaaccctctgaacagtttgccaacaagttcatgcagatgacacccttcacccgttggaggcttcgtctgtctgcgtccgcaaaagagaatgcaggattagcctttcccacggctacagcacttgactccactacccagattgtcatcactttccatgttacggccatcagacaaattgactggcggcacgacgaagag

SEQ ID NO: 217 - DNA, 2601 bp, synthetic construct
  misc_feature 1..2601: note = PtIP-83 polypeptide variant encoding sequence
  source 1..2601: mol_type = other DNA
atggctctcgtggattacggcaagcttttcgaggatctgaaccagataagcatgggtgtactggatcgggtagagttttcagaggtgatggtgatccacaggatgtatgtgaggctagctgatctgaatgtggggcagctcgagggagccgagaaagtgatgcggttgtatgtttttagcgacattatcgtgctaccagtcgtggaatggcggtggccgccgcaaataccaggatcggtgacggtgatcatattgtgtcgtcttcttcaatggccaactgatgggaggcagtcggacaccgagctccacctgacattcatgaagttgcatgccatacaacgagaggaaaatcggtgggagataaccgcagcagatggcatgaactggggagtttacatacacgcagaggaagtacaggttggcgtgctgacaatgtcatggtcttcggtacttagagtttcggcacttcgctctgttataacctccggctttcgcgccgttagtgtgtttgaggtaccgggaagtgtaaggtccacccttggagctactttaaggcccgatcacgccttatatagtacaactatgcaagccacacccaacgcatcgcatattagtgcttttaaccttcgcatagtttccccgtcggcatatcgtgtttgtcctctccaaaatgacacagatacctacttaggtattccagcagacgtggcggcagttcttccagtagacgtggtgactgatcctaacatcttgctgggcatgcagacaacggtacacattgcggagctagtcaaggcatgtcatccgtcacccgatgttgtgagcgctgtaggggagcacctgaactggctcaacaaactcttactcccacttaaggaatcgactcagttgcaaggaagcgagtcgtacaaggagtgccttgcactcttgggtcgtgttcacgctgcgatgaagatggtgagaattggcttagtagtgccccagctgcaatacagaatgtacggtagcctcatcaaccaaatggcccaagtagcacaaaactacgaccgagaattcaagcaattcaaattattcatcatccaaaatcaaatccttggcagctatttgctgcagcagaacagggcatttgctgagagggagctgcagatggagagctttcatgctgctgtcatttctcaaagaagggaggagttggacaatacattcgcaaagatggaccgattgagcgggcaaatggaggcagagagtagtgcaatggagcaagccaaaaaggaaatggacgaaggattgaggcagttccagaataggcaagttgcgaacgccctctttgccgttcttagcgctgtagctcagattgggcttgcattccttacggctggtgcaacggctcctggagctgtggcgtcggcggggcaagctgtgagcatagcaggtcaggcggcgcaaggtctgcgaagggtggtggaaattctagagcagctggaggctgtgatggaggttgtggctgctgtgaaggacctcgtggattcattggaacaggtaggtcagattgtggacgcaccggtgatgccggaattgccctcagaggcggactggtccatttttgtgaacgaggtggaggccgtggcagagggcatgccaacggaagtctcggaggttccggtgtggagggccaagtgcaagaatgtggctgcactgggtcgggagatgagcatcacggcagtacagatgtcggagctgcagtatgacatctgggtgcaaggcatgatgcgggatatggctcgaagccaggcagacaggctggccgcaattcaacccgcggaccttaccaactatttggagatggctacccagatggatatgcggactacgaggatgctgctggggctcctcaacatattgcgcatccagaatgcggcgctcaggtacgagtatcttctaatgcccacggagctcacaacatggccactgggtatggataccgtgggtgacttgctcatcgcgcaggagaatgctgcactgataggattaatgcagctagggccctcatctgatttcacgagcaggcatgtggtgaaagacatacctgtgaacttgctgctcgatggcgaggattgggagtttgagattcctgtgcaagctggcatgtccagcttcccttccagctggtctcgcgtccgtattcggcacctggagatgcactttgtgaaggaggccagcggtattggtggtgagattatccaccagcctaccacccagactgggaccgtttacatccttctgcagggttccactatcttccatgaccgcagaagagaccaggtgttgccttttcaggccgctgctccgctcaactaccattacgcgtaccgcctcgacaccggcgactccactctcacaaacgaaccctctgaacagtttgccaacaagttcatgcagatgacacccttcacccgttggaggcttcgtctgtctgcgtccgcaaaagagaatgcaggattagcctttcccacggctacagcacttgactccactacccagattgtcatcactttccatgttacggccatcagacaaattgactggcggcacgacgaagag

SEQ ID NO: 218 - DNA, 2601 bp, synthetic construct
  misc_feature 1..2601: note = PtIP-83 polypeptide variant encoding sequence
  source 1..2601: mol_type = other DNA
atggctctcgtggattacggcaagcttttcgaggatctgaaccagataagcatgggtgtactggatcgggtagagttttcagaggtgatggtgatccacaggatgtatgtgaggctagctgatctgaatgtggggcagctcgagggagccgagaaagtgaggcacttgtatatttttgccgacattatcgagctaccagtcgtggaatggcggtggccgccgcaaataccaggatcggtgacggtgatcatattgtgtcgtcttcttcaatggccaactgatgggaggcagtcggacaccgagctccacctgacattcatgaagttgcatgccatacaacgagaggaaaatcggtgggagataaccgcagcagatggcatgaactggggagtttacatacacgcagaggaagtacaggttggcgtgctgacaatgtcatggtcttcggtacttagagtttcggcacttcgctctgttataacctccggctttcgcgccgttagtgtgtttgaggtaccgggaagtgtaaggtccacccttggagctactttaaggcccgatcacgccttatatagtacaactatgcaagccacacccaacgcatcgcatattagtgcttttaaccttcgcatagtttccccgtcggcatatcgtgtttgtcctctccaaaatgacacagatacctacttaggtattccagcagacgtggcggcagttcttccagtagacgtggtgactgatcctaacatcttgctgggcatgcagacaacggtacacattgcggagctagtcaaggcatgtcatccgtcacccgatgttgtgagcgctgtaggggagcacctgaactggctcaacaaactcttactcccacttaaggaatcgactcagttgcaaggaagcgagtcgtacaaggagtgccttgcactcttgggtcgtgttcacgctgcgatgaagatggtgagaattggcttagtagtgccccagctgcaatacagaatgtacggtagcctcatcaaccaaatggcccaagtagcacaaaactacgaccgagaattcaagcaattcaaattattcatcatccaaaatcaaatccttggcagctatttgctgcagcagaacagggcatttgctgagagggagctgcagatggagagctttcatgctgctgtcatttctcaaagaagggaggagttggacaatacattcgcaaagatggaccgattgagcgggcaaatggaggcagagagtagtgcaatggagcaagccaaaaaggaaatggacgaaggattgaggcagttccagaataggcaagttgcgaacgccctctttgccgttcttagcgctgtagctcagattgggcttgcattccttacggctggtgcaacggctcctggagctgtggcgtcggcggggcaagctgtgagcatagcaggtcaggcggcgcaaggtctgcgaagggtggtggaaattctagagcagctggaggctgtgatggaggttgtggctgctgtgaaggacctcgtggattcattggaacaggtaggtcagattgtggacgcaccggtgatgccggaattgccctcagaggcggactggtccatttttgtgaacgaggtggaggccgtggcagagggcatgccaacggaagtctcggaggttccggtgtggagggccaagtgcaagaatgtggctgcactgggtcgggagatgagcatcacggcagtacagatgtcggagctgcagtatgacatctgggtgcaaggcatgatgcgggatatggctcgaagccaggcagacaggctggccgcaattcaacccgcggaccttaccaactatttggagatggctacccagatggatatgcggactacgaggatgctgctggggctcctcaacatattgcgcatccagaatgcggcgctcaggtacgagtatcttctaatgcccacggagctcacaacatggccactgggtatggataccgtgggtgacttgctcatcgcgcaggagaatgctgcactgataggattaatgcagctagggccctcatctgatttcacgagcaggcatgtggtgaaagacatacctgtgaacttgctgctcgatggcgaggattgggagtttgagattcctgtgcaagctggcatgtccagcttcccttccagctggtctcgcgtccgtattcggcacctggagatgcactttgtgaaggaggccagcggtattggtggtgagattatccaccagcctaccacccagactgggaccgtttacatccttctgcagggttccactatcttccatgaccgcagaagagaccaggtgttgccttttcaggccgctgctccgctcaactaccattacgcgtaccgcctcgacaccggcgactccactctcacaaacgaaccctctgaacagtttgccaacaagttcatgcagatgacacccttcacccgttggaggcttcgtctgtctgcgtccgcaaaagagaatgcaggattagcctttcccacggctacagcacttgactccactacccagattgtcatcactttccatgttacggccatcagacaaattgactggcggcacgacgaagag

SEQ ID NO: 219 - DNA, 2601 bp, synthetic construct
  misc_feature 1..2601: note = PtIP-83 polypeptide variant encoding sequence
  source 1..2601: mol_type = other DNA
atggctctcgtggattacggcaagcttttcgaggatctgaaccagataagcatgggtgtactggatcgggtagagttttcagaggtgatggtgatccacaggatgtatgtgaggctagctgatctgaatgtggggcagctcgagggagccgagaaagtgaggcacttgtatatttttgccgacgttgtcgagctaccagtcgtggaatggcggtggccgccgcaaataccaggatcggtgacggtgatcatattgtgtcgtcttcttcaatggccaactgatgggaggcagtcggacaccgagctccacctgacattcatgaagttgcatgccatacaacgagaggaaaatcggtgggagataaccgcagcagatggcatgaactggggagtttacatacacgcagaggaagtacaggttggcgtgctgacaatgtcatggtcttcggtacttagagtttcggcacttcgctctgttataacctccggctttcgcgccgttagtgtgtttgaggtaccgggaagtgtaaggtccacccttggagctactttaaggcccgatcacgccttatatagtacaactatgcaagccacacccaacgcatcgcatattagtgcttttaaccttcgcatagtttccccgtcggcatatcgtgtttgtcctctccaaaatgacacagatacctacttaggtattccagcagacgtggcggcagttcttccagtagacgtggtgactgatcctaacatcttgctgggcatgcagacaacggtacacattgcggagctagtcaaggcatgtcatccgtcacccgatgttgtgagcgctgtaggggagcacctgaactggctcaacaaactcttactcccacttaaggaatcgactcagttgcaaggaagcgagtcgtacaaggagtgccttgcactcttgggtcgtgttcacgctgcgatgaagatggtgagaattggcttagtagtgccccagctgcaatacagaatgtacggtagcctcatcaaccaaatggcccaagtagcacaaaactacgaccgagaattcaagcaattcaaattattcatcatccaaaatcaaatccttggcagctatttgctgcagcagaacagggcatttgctgagagggagctgcagatggagagctttcatgctgctgtcatttctcaaagaagggaggagttggacaatacattcgcaaagatggaccgattgagcgggcaaatggaggcagagagtagtgcaatggagcaagccaaaaaggaaatggacgaaggattgaggcagttccagaataggcaagttgcgaacgccctctttgccgttcttagcgctgtagctcagattgggcttgcattccttacggctggtgcaacggctcctggagctgtggcgtcggcggggcaagctgtgagcatagcaggtcaggcggcgcaaggtctgcgaagggtggtggaaattctagagcagctggaggctgtgatggaggttgtggctgctgtgaaggacctcgtggattcattggaacaggtaggtcagattgtggacgcaccggtgatgccggaattgccctcagaggcggactggtccatttttgtgaacgaggtggaggccgtggcagagggcatgccaacggaagtctcggaggttccggtgtggagggccaagtgcaagaatgtggctgcactgggtcgggagatgagcatcacggcagtacagatgtcggagctgcagtatgacatctgggtgcaaggcatgatgcgggatatggctcgaagccaggcagacaggctggccgcaattcaacccgcggaccttaccaactatttggagatggctacccagatggatatgcggactacgaggatgctgctggggctcctcaacatattgcgcatccagaatgcggcgctcaggtacgagtatcttctaatgcccacggagctcacaacatggccactgggtatggataccgtgggtgacttgctcatcgcgcaggagaatgctgcactgataggattaatgcagctagggccctcatctgatttcacgagcaggcatgtggtgaaagacatacctgtgaacttgctgctcgatggcgaggattgggagtttgagattcctgtgcaagctggcatgtccagcttcccttccagctggtctcgcgtccgtattcggcacctggagatgcactttgtgaaggaggccagcggtattggtggtgagattatccaccagcctaccacccagactgggaccgtttacatccttctgcagggttccactatcttccatgaccgcagaagagaccaggtgttgccttttcaggccgctgctccgctcaactaccattacgcgtaccgcctcgacaccggcgactccactctcacaaacgaaccctctgaacagtttgccaacaagttcatgcagatgacacccttcacccgttggaggcttcgtctgtctgcgtccgcaaaagagaatgcaggattagcctttcccacggctacagcacttgactccactacccagattgtcatcactttccatgttacggccatcagacaaattgactggcggcacgacgaagag

SEQ ID NO: 220 - DNA, 2601 bp, synthetic construct
  misc_feature 1..2601: note = PtIP-83 polypeptide variant encoding sequence
  source 1..2601: mol_type = other DNA
atggctctcgtggattacggcaagcttttcgaggatctgaaccagataagcatgggtgtactggatcgggtagagttttcagaggtgatggtgatccacaggatgtatgtgaggctagctgatctgaatgtggggcagctcgagggagccgagaaagtgaggcacttgtatattttttgcgacgttatcgagctaccagtcgtggaatggcggtggccgccgcaaataccaggatcggtgacggtgatcatattgtgtcgtcttcttcaatggccaactgatgggaggcagtcggacaccgagctccacctgacattcatgaagttgcatgccatacaacgagaggaaaatcggtgggagataaccgcagcagatggcatgaactggggagtttacatacacgcagaggaagtacaggttggcgtgctgacaatgtcatggtcttcggtacttagagtttcggcacttcgctctgttataacctccggctttcgcgccgttagtgtgtttgaggtaccgggaagtgtaaggtccacccttggagctactttaaggcccgatcacgccttatatagtacaactatgcaagccacacccaacgcatcgcatattagtgcttttaaccttcgcatagtttccccgtcggcatatcgtgtttgtcctctccaaaatgacacagatacctacttaggtattccagcagacgtggcggcagttcttccagtagacgtggtgactgatcctaacatcttgctgggcatgcagacaacggtacacattgcggagctagtcaaggcatgtcatccgtcacccgatgttgtgagcgctgtaggggagcacctgaactggctcaacaaactcttactcccacttaaggaatcgactcagttgcaaggaagcgagtcgtacaaggagtgccttgcactcttgggtcgtgttcacgctgcgatgaagatggtgagaattggcttagtagtgccccagctgcaatacagaatgtacggtagcctcatcaaccaaatggcccaagtagcacaaaactacgaccgagaattcaagcaattcaaattattcatcatccaaaatcaaatccttggcagctatttgctgcagcagaacagggcatttgctgagagggagctgcagatggagagctttcatgctgctgtcatttctcaaagaagggaggagttggacaatacattcgcaaagatggaccgattgagcgggcaaatggaggcagagagtagtgcaatggagcaagccaaaaaggaaatggacgaaggattgaggcagttccagaataggcaagttgcgaacgccctctttgccgttcttagcgctgtagctcagattgggcttgcattccttacggctggtgcaacggctcctggagctgtggcgtcggcggggcaagctgtgagcatagcaggtcaggcggcgcaaggtctgcgaagggtggtggaaattctagagcagctggaggctgtgatggaggttgtggctgctgtgaaggacctcgtggattcattggaacaggtaggtcagattgtggacgcaccggtgatgccggaattgccctcagaggcggactggtccatttttgtgaacgaggtggaggccgtggcagagggcatgccaacggaagtctcggaggttccggtgtggagggccaagtgcaagaatgtggctgcactgggtcgggagatgagcatcacggcagtacagatgtcggagctgcagtatgacatctgggtgcaaggcatgatgcgggatatggctcgaagccaggcagacaggctggccgcaattcaacccgcggaccttaccaactatttggagatggctacccagatggatatgcggactacgaggatgctgctggggctcctcaacatattgcgcatccagaatgcggcgctcaggtacgagtatcttctaatgcccacggagctcacaacatggccactgggtatggataccgtgggtgacttgctcatcgcgcaggagaatgctgcactgataggattaatgcagctagggccctcatctgatttcacgagcaggcatgtggtgaaagacatacctgtgaacttgctgctcgatggcgaggattgggagtttgagattcctgtgcaagctggcatgtccagcttcccttccagctggtctcgcgtccgtattcggcacctggagatgcactttgtgaaggaggccagcggtattggtggtgagattatccaccagcctaccacccagactgggaccgtttacatccttctgcagggttccactatcttccatgaccgcagaagagaccaggtgttgccttttcaggccgctgctccgctcaactaccattacgcgtaccgcctcgacaccggcgactccactctcacaaacgaaccctctgaacagtttgccaacaagttcatgcagatgacacccttcacccgttggaggcttcgtctgtctgcgtccgcaaaagagaatgcaggattagcctttcccacggctacagcacttgactccactacccagattgtcatcactttccatgttacggccatcagacaaattgactggcggcacgacgaagag

SEQ ID NO: 221 - DNA, 2601 bp, synthetic construct
  misc_feature 1..2601: note = PtIP-83 polypeptide variant encoding sequence
  source 1..2601: mol_type = other DNA
atggctctcgtggattacggcaagcttttcgaggatctgaaccagataagcatgggtgtactggatcgggtagagttttcagaggtgatggtgatccacaggatgtatgtgaggctagctgatctgaatgtggggcagctcgagggagccgagaaagtgaggcacttgtatattttttccgacgttatcgagctaccagtcgtggaatggcggtggccgccgcaaataccaggatcggtgacggtgatcatattgtgtcgtcttcttcaatggccaactgatgggaggcagtcggacaccgagctccacctgacattcatgaagttgcatgccatacaacgagaggaaaatcggtgggagataaccgcagcagatggcatgaactggggagtttacatacacgcagaggaagtacaggttggcgtgctgacaatgtcatggtcttcggtacttagagtttcggcacttcgctctgttataacctccggctttcgcgccgttagtgtgtttgaggtaccgggaagtgtaaggtccacccttggagctactttaaggcccgatcacgccttatatagtacaactatgcaagccacacccaacgcatcgcatattagtgcttttaaccttcgcatagtttccccgtcggcatatcgtgtttgtcctctccaaaatgacacagatacctacttaggtattccagcagacgtggcggcagttcttccagtagacgtggtgactgatcctaacatcttgctgggcatgcagacaacggtacacattgcggagctagtcaaggcatgtcatccgtcacccgatgttgtgagcgctgtaggggagcacctgaactggctcaacaaactcttactcccacttaaggaatcgactcagttgcaaggaagcgagtcgtacaaggagtgccttgcactcttgggtcgtgttcacgctgcgatgaagatggtgagaattggcttagtagtgccccagctgcaatacagaatgtacggtagcctcatcaaccaaatggcccaagtagcacaaaactacgaccgagaattcaagcaattcaaattattcatcatccaaaatcaaatccttggcagctatttgctgcagcagaacagggcatttgctgagagggagctgcagatggagagctttcatgctgctgtcatttctcaaagaagggaggagttggacaatacattcgcaaagatggaccgattgagcgggcaaatggaggcagagagtagtgcaatggagcaagccaaaaaggaaatggacgaaggattgaggcagttccagaataggcaagttgcgaacgccctctttgccgttcttagcgctgtagctcagattgggcttgcattccttacggctggtgcaacggctcctggagctgtggcgtcggcggggcaagctgtgagcatagcaggtcaggcggcgcaaggtctgcgaagggtggtggaaattctagagcagctggaggctgtgatggaggttgtggctgctgtgaaggacctcgtggattcattggaacaggtaggtcagattgtggacgcaccggtgatgccggaattgccctcagaggcggactggtccatttttgtgaacgaggtggaggccgtggcagagggcatgccaacggaagtctcggaggttccggtgtggagggccaagtgcaagaatgtggctgcactgggtcgggagatgagcatcacggcagtacagatgtcggagctgcagtatgacatctgggtgcaaggcatgatgcgggatatggctcgaagccaggcagacaggctggccgcaattcaacccgcggaccttaccaactatttggagatggctacccagatggatatgcggactacgaggatgctgctggggctcctcaacatattgcgcatccagaatgcggcgctcaggtacgagtatcttctaatgcccacggagctcacaacatggccactgggtatggataccgtgggtgacttgctcatcgcgcaggagaatgctgcactgataggattaatgcagctagggccctcatctgatttcacgagcaggcatgtggtgaaagacatacctgtgaacttgctgctcgatggcgaggattgggagtttgagattcctgtgcaagctggcatgtccagcttcccttccagctggtctcgcgtccgtattcggcacctggagatgcactttgtgaaggaggccagcggtattggtggtgagattatccaccagcctaccacccagactgggaccgtttacatccttctgcagggttccactatcttccatgaccgcagaagagaccaggtgttgccttttcaggccgctgctccgctcaactaccattacgcgtaccgcctcgacaccggcgactccactctcacaaacgaaccctctgaacagtttgccaacaagttcatgcagatgacacccttcacccgttggaggcttcgtctgtctgcgtccgcaaaagagaatgcaggattagcctttcccacggctacagcacttgactccactacccagattgtcatcactttccatgttacggccatcagacaaattgactggcggcacgacgaagag

SEQ ID NO: 222 - DNA, 2601 bp, synthetic construct
  misc_feature 1..2601: note = PtIP-83 polypeptide variant encoding sequence
  source 1..2601: mol_type = other DNA
atggctctcgtggattacggcaagcttttcgaggatctgaaccagataagcatgggtgtactggatcgggtagagttttcagaggtgatggtgatccacaggatgtatgtgaggctagctgatctgaatgtggggcagctcgagggagccgagaaagtgaggcacttgtatatttttagcgacgttgtcgagctaccagtcgtggaatggcggtggccgccgcaaataccaggatcggtgacggtgatcatattgtgtcgtcttcttcaatggccaactgatgggaggcagtcggacaccgagctccacctgacattcatgaagttgcatgccatacaacgagaggaaaatcggtgggagataaccgcagcagatggcatgaactggggagtttacatacacgcagaggaagtacaggttggcgtgctgacaatgtcatggtcttcggtacttagagtttcggcacttcgctctgttataacctccggctttcgcgccgttagtgtgtttgaggtaccgggaagtgtaaggtccacccttggagctactttaaggcccgatcacgccttatatagtacaactatgcaagccacacccaacgcatcgcatattagtgcttttaaccttcgcatagtttccccgtcggcatatcgtgtttgtcctctccaaaatgacacagatacctacttaggtattccagcagacgtggcggcagttcttccagtagacgtggtgactgatcctaacatcttgctgggcatgcagacaacggtacacattgcggagctagtcaaggcatgtcatccgtcacccgatgttgtgagcgctgtaggggagcacctgaactggctcaacaaactcttactcccacttaaggaatcgactcagttgcaaggaagcgagtcgtacaaggagtgccttgcactcttgggtcgtgttcacgctgcgatgaagatggtgagaattggcttagtagtgccccagctgcaatacagaatgtacggtagcctcatcaaccaaatggcccaagtagcacaaaactacgaccgagaattcaagcaattcaaattattcatcatccaaaatcaaatccttggcagctatttgctgcagcagaacagggcatttgctgagagggagctgcagatggagagctttcatgctgctgtcatttctcaaagaagggaggagttggacaatacattcgcaaagatggaccgattgagcgggcaaatggaggcagagagtagtgcaatggagcaagccaaaaaggaaatggacgaaggattgaggcagttccagaataggcaagttgcgaacgccctctttgccgttcttagcgctgtagctcagattgggcttgcattccttacggctggtgcaacggctcctggagctgtggcgtcggcggggcaagctgtgagcatagcaggtcaggcggcgcaaggtctgcgaagggtggtggaaattctagagcagctggaggctgtgatggaggttgtggctgctgtgaaggacctcgtggattcattggaacaggtaggtcagattgtggacgcaccggtgatgccggaattgccctcagaggcggactggtccatttttgtgaacgaggtggaggccgtggcagagggcatgccaacggaagtctcggaggttccggtgtggagggccaagtgcaagaatgtggctgcactgggtcgggagatgagcatcacggcagtacagatgtcggagctgcagtatgacatctgggtgcaaggcatgatgcgggatatggctcgaagccaggcagacaggctggccgcaattcaacccgcggaccttaccaactatttggagatggctacccagatggatatgcggactacgaggatgctgctggggctcctcaacatattgcgcatccagaatgcggcgctcaggtacgagtatcttctaatgcccacggagctcacaacatggccactgggtatggataccgtgggtgacttgctcatcgcgcaggagaatgctgcactgataggattaatgcagctagggccctcatctgatttcacgagcaggcatgtggtgaaagacatacctgtgaacttgctgctcgatggcgaggattgggagtttgagattcctgtgcaagctggcatgtccagcttcccttccagctggtctcgcgtccgtattcggcacctggagatgcactttgtgaaggaggccagcggtattggtggtgagattatccaccagcctaccacccagactgggaccgtttacatccttctgcagggttccactatcttccatgaccgcagaagagaccaggtgttgccttttcaggccgctgctccgctcaactaccattacgcgtaccgcctcgacaccggcgactccactctcacaaacgaaccctctgaacagtttgccaacaagttcatgcagatgacacccttcacccgttggaggcttcgtctgtctgcgtccgcaaaagagaatgcaggattagcctttcccacggctacagcacttgactccactacccagattgtcatcactttccatgttacggccatcagacaaattgactggcggcacgacgaagag

SEQ ID NO: 223 - DNA, 2601 bp, synthetic construct
  misc_feature 1..2601: note = PtIP-83 polypeptide variant encoding sequence
  source 1..2601: mol_type = other DNA
atggctctcgtggattacggcaagcttttcgaggatctgaaccagataagcatgggtgtactggatcgggtagagttttcagaggtgatggtgatccacaggatgtatgtgaggctagctgatctgaatgtggggcagctcgagggagccgagaaagtgaggcacttgtatgtttttaccgacgttctcgagctaccagtcgtggaatggcggtggccaccgcaaataccaggatcggtgacggtgatcatattgtgtcgtcttcttcaatggccaactgatgggaggcagtcggacaccgagctccacctgacattcatgaagttgcatgccatacaacgagaggaaaatcggtgggagataaccgcagcagatggcatgaactggggagtttacatacacgcagaggaagtacaggttggcgtgctgacaatgtcatggtcttcggtacttagagtttcggcacttcgctctgttataacctccggctttcgcgccgttagtgtgtttgaggtaccgggaagtgtaaggtccacccttggagctactttaaggcccgatcacgccttatatagtacaactatgcaagccacacccaacgcatcgcatattagtgcttttaaccttcgcatagtttccccgtcggcatatcgtgtttgtcctctccaaaatgacacagatacctacttaggtattccagcagacgtggcggcagttcttccagtagacgtggtgactgatcctaacatcttgctgggcatgcagacaacggtacacattgcggagctagtcaaggcatgtcatccgtcacccgatgttgtgagcgctgtaggggagcacctgaactggctcaacaaactcttactcccacttaaggaatcgactcagttgcaaggaagcgagtcgtacaaggagtgccttgcactcttgggtcgtgttcacgctgcgatgaagatggtgagaattggcttagtagtgccccagctgcaatacagaatgtacggtagcctcatcaaccaaatggcccaagtagcacaaaactacgaccgagaattcaagcaattcaaattattcatcatccaaaatcaaatccttggcagctatttgctgcagcagaacagggcatttgctgagagggagctgcagatggagagctttcatgctgctgtcatttctcaaagaagggaggagttggacaatacattcgcaaagatggaccgattgagcgggcaaatggaggcagagagtagtgcaatggagcaagccaaaaaggaaatggacgaaggattgaggcagttccagaataggcaagttgcgaacgccctctttgccgttcttagcgctgtagctcagattgggcttgcattccttacggctggtgcaacggctcctggagctgtggcgtcggcggggcaagctgtgagcatagcaggtcaggcggcgcaaggtctgcgaagggtggtggaaattctagagcagctggaggctgtgatggaggttgtggctgctgtgaaggacctcgtggattcattggaacaggtaggtcagattgtggacgcaccggtgatgccggaattgccctcagaggcggactggtccatttttgtgaacgaggtggaggccgtggcagagggcatgccaacggaagtctcggaggttccggtgtggagggccaagtgcaagaatgtggctgcactgggtcgggagatgagcatcacggcagtacagatgtcggagctgcagtatgacatctgggtgcaaggcatgatgcgggatatggctcgaagccaggcagacaggctggccgcaattcaacccgcggaccttaccaactatttggagatggctacccagatggatatgcggactacgaggatgctgctggggctcctcaacatattgcgcatccagaatgcggcgctcaggtacgagtatcttctaatgcccacggagctcacaacatggccactgggtatggataccgtgggtgacttgctcatcgcgcaggagaatgctgcactgataggattaatgcagctagggccctcatctgatttcacgagcaggcatgtggtgaaagacatacctgtgaacttgctgctcgatggcgaggattgggagtttgagattcctgtgcaagctggcatgtccagcttcccttccagctggtctcgcgtccgtattcggcacctggagatgcactttgtgaaggaggccagcggtattggtggtgagattatccaccagcctaccacccagactgggaccgtttacatccttctgcagggttccactatcttccatgaccgcagaagagaccaggtgttgccttttcaggccgctgctccgctcaactaccattacgcgtaccgcctcgacaccggcgactccactctcacaaacgaaccctctgaacagtttgccaacaagttcatgcagatgacacccttcacccgttggaggcttcgtctgtctgcgtccgcaaaagagaatgcaggattagcctttcccacggctacagcacttgactccactacccagattgtcatcactttccatgttacggccatcagacaaattgactggcggcacgacgaagag

SEQ ID NO: 224 - DNA, 2601 bp, synthetic construct
  misc_feature 1..2601: note = PtIP-83 polypeptide variant encoding sequence
  source 1..2601: mol_type = other DNA
atggctctcgtggattacggcaagcttttcgaggatctgaaccagataagcatgggtgtactggatcgggtagagttttcagaggtgatggtgatccacaggatgtatgtgaggctagctgatctgaatgtggggcagctcgagggagccgagaaagtgaggcagttgtatattttttgcgacgttatcgtgctaccagtcgtggaatggcggtggccgccgcaaataccaggatcggtgacggtgatcatattgtgtcgtcttcttcaatggccaactgatgggaggcagtcggacaccgagctccacctgacattcatgaagttgcatgccatacaacgagaggaaaatcggtgggagataaccgcagcagatggcatgaactggggagtttacatacacgcagaggaagtacaggttggcgtgctgacaatgtcatggtcttcggtacttagagtttcggcacttcgctctgttataacctccggctttcgcgccgttagtgtgtttgaggtaccgggaagtgtaaggtccacccttggagctactttaaggcccgatcacgccttatatagtacaactatgcaagccacacccaacgcatcgcatattagtgcttttaaccttcgcatagtttccccgtcggcatatcgtgtttgtcctctccaaaatgacacagatacctacttaggtattccagcagacgtggcggcagttcttccagtagacgtggtgactgatcctaacatcttgctgggcatgcagacaacggtacacattgcggagctagtcaaggcatgtcatccgtcacccgatgttgtgagcgctgtaggggagcacctgaactggctcaacaaactcttactcccacttaaggaatcgactcagttgcaaggaagcgagtcgtacaaggagtgccttgcactcttgggtcgtgttcacgctgcgatgaagatggtgagaattggcttagtagtgccccagctgcaatacagaatgtacggtagcctcatcaaccaaatggcccaagtagcacaaaactacgaccgagaattcaagcaattcaaattattcatcatccaaaatcaaatccttggcagctatttgctgcagcagaacagggcatttgctgagagggagctgcagatggagagctttcatgctgctgtcatttctcaaagaagggaggagttggacaatacattcgcaaagatggaccgattgagcgggcaaatggaggcagagagtagtgcaatggagcaagccaaaaaggaaatggacgaaggattgaggcagttccagaataggcaagttgcgaacgccctctttgccgttcttagcgctgtagctcagattgggcttgcattccttacggctggtgcaacggctcctggagctgtggcgtcggcggggcaagctgtgagcatagcaggtcaggcggcgcaaggtctgcgaagggtggtggaaattctagagcagctggaggctgtgatggaggttgtggctgctgtgaaggacctcgtggattcattggaacaggtaggtcagattgtggacgcaccggtgatgccggaattgccctcagaggcggactggtccatttttgtgaacgaggtggaggccgtggcagagggcatgccaacggaagtctcggaggttccggtgtggagggccaagtgcaagaatgtggctgcactgggtcgggagatgagcatcacggcagtacagatgtcggagctgcagtatgacatctgggtgcaaggcatgatgcgggatatggctcgaagccaggcagacaggctggccgcaattcaacccgcggaccttaccaactatttggagatggctacccagatggatatgcggactacgaggatgctgctggggctcctcaacatattgcgcatccagaatgcggcgctcaggtacgagtatcttctaatgcccacggagctcacaacatggccactgggtatggataccgtgggtgacttgctcatcgcgcaggagaatgctgcactgataggattaatgcagctagggccctcatctgatttcacgagcaggcatgtggtgaaagacatacctgtgaacttgctgctcgatggcgaggattgggagtttgagattcctgtgcaagctggcatgtccagcttcccttccagctggtctcgcgtccgtattcggcacctggagatgcactttgtgaaggaggccagcggtattggtggtgagattatccaccagcctaccacccagactgggaccgtttacatccttctgcagggttccactatcttccatgaccgcagaagagaccaggtgttgccttttcaggccgctgctccgctcaactaccattacgcgtaccgcctcgacaccggcgactccactctcacaaacgaaccctctgaacagtttgccaacaagttcatgcagatgacacccttcacccgttggaggcttcgtctgtctgcgtccgcaaaagagaatgcaggattagcctttcccacggctacagcacttgactccactacccagattgtcatcactttccatgttacggccatcagacaaattgactggcggcacgacgaagag

SEQ ID NO: 225 - DNA, 2601 bp, synthetic construct
  misc_feature 1..2601: note = PtIP-83 polypeptide variant encoding sequence
  source 1..2601: mol_type = other DNA
atggctctcgtggattacggcaagcttttcgaggatctgaaccagataagcatgggtgtactggatcgggtagagttttcagaggtgatggtgatccacaggatgtatgtgaggctagctgatctgaatgtggggcagctcgagggagccgagaaagtgaggcagttgtatatttttagcgacgttgtcgtgctaccagtcgtggaatggcggtggccgccgcaaataccaggatcggtgacggtgatcatattgtgtcgtcttcttcaatggccaactgatgggaggcagtcggacaccgagctccacctgacattcatgaagttgcatgccatacaacgagaggaaaatcggtgggagataaccgcagcagatggcatgaactggggagtttacatacacgcagaggaagtacaggttggcgtgctgacaatgtcatggtcttcggtacttagagtttcggcacttcgctctgttataacctccggctttcgcgccgttagtgtgtttgaggtaccgggaagtgtaaggtccacccttggagctactttaaggcccgatcacgccttatatagtacaactatgcaagccacacccaacgcatcgcatattagtgcttttaaccttcgcatagtttccccgtcggcatatcgtgtttgtcctctccaaaatgacacagatacctacttaggtattccagcagacgtggcggcagttcttccagtagacgtggtgactgatcctaacatcttgctgggcatgcagacaacggtacacattgcggagctagtcaaggcatgtcatccgtcacccgatgttgtgagcgctgtaggggagcacctgaactggctcaacaaactcttactcccacttaaggaatcgactcagttgcaaggaagcgagtcgtacaaggagtgccttgcactcttgggtcgtgttcacgctgcgatgaagatggtgagaattggcttagtagtgccccagctgcaatacagaatgtacggtagcctcatcaaccaaatggcccaagtagcacaaaactacgaccgagaattcaagcaattcaaattattcatcatccaaaatcaaatccttggcagctatttgctgcagcagaacagggcatttgctgagagggagctgcagatggagagctttcatgctgctgtcatttctcaaagaagggaggagttggacaatacattcgcaaagatggaccgattgagcgggcaaatggaggcagagagtagtgcaatggagcaagccaaaaaggaaatggacgaaggattgaggcagttccagaataggcaagttgcgaacgccctctttgccgttcttagcgctgtagctcagattgggcttgcattccttacggctggtgcaacggctcctggagctgtggcgtcggcggggcaagctgtgagcatagcaggtcaggcggcgcaaggtctgcgaagggtggtggaaattctagagcagctggaggctgtgatggaggttgtggctgctgtgaaggacctcgtggattcattggaacaggtaggtcagattgtggacgcaccggtgatgccggaattgccctcagaggcggactggtccatttttgtgaacgaggtggaggccgtggcagagggcatgccaacggaagtctcggaggttccggtgtggagggccaagtgcaagaatgtggctgcactgggtcgggagatgagcatcacggcagtacagatgtcggagctgcagtatgacatctgggtgcaaggcatgatgcgggatatggctcgaagccaggcagacaggctggccgcaattcaacccgcggaccttaccaactatttggagatggctacccagatggatatgcggactacgaggatgctgctggggctcctcaacatattgcgcatccagaatgcggcgctcaggtacgagtatcttctaatgcccacggagctcacaacatggccactgggtatggataccgtgggtgacttgctcatcgcgcaggagaatgctgcactgataggattaatgcagctagggccctcatctgatttcacgagcaggcatgtggtgaaagacatacctgtgaacttgctgctcgatggcgaggattgggagtttgagattcctgtgcaagctggcatgtccagcttcccttccagctggtctcgcgtccgtattcggcacctggagatgcactttgtgaaggaggccagcggtattggtggtgagattatccaccagcctaccacccagactgggaccgtttacatccttctgcagggttccactatcttccatgaccgcagaagagaccaggtgttgccttttcaggccgctgctccgctcaactaccattacgcgtaccgcctcgacaccggcgactccactctcacaaacgaaccctctgaacagtttgccaacaagttcatgcagatgacacccttcacccgttggaggcttcgtctgtctgcgtccgcaaaagagaatgcaggattagcctttcccacggctacagcacttgactccactacccagattgtcatcactttccatgttacggccatcagacaaattgactggcggcacgacgaagag

SEQ ID NO: 226 - DNA, 2601 bp, synthetic construct
  misc_feature 1..2601: note = PtIP-83 polypeptide variant encoding sequence
  source 1..2601: mol_type = other DNA
atggctctcgtggattacggcaagcttttcgaggatctgaaccagataagcatgggtgtactggatcgggtagagttttcagaggtgatggtgatccacaggatgtatgtgaggctagctgatctgaatgtggggcagctcgagggagccgagaaagtgaggcagttgtatgttttttgcgacgttctcgtgctaccagtcgtggaatggcggtggccgccgcaaataccaggatcggtgacggtgatcatattgtgtcgtcttcttcaatggccaactgatgggaggcagtcggacaccgagctccacctgacattcatgaagttgcatgccatacaacgagaggaaaatcggtgggagataaccgcagcagatggcatgaactggggagtttacatacacgcagaggaagtacaggttggcgtgctgacaatgtcatggtcttcggtacttagagtttcggcacttcgctctgttataacctccggctttcgcgccgttagtgtgtttgaggtaccgggaagtgtaaggtccacccttggagctactttaaggcccgatcacgccttatatagtacaactatgcaagccacacccaacgcatcgcatattagtgcttttaaccttcgcatagtttccccgtcggcatatcgtgtttgtcctctccaaaatgacacagatacctacttaggtattccagcagacgtggcggcagttcttccagtagacgtggtgactgatcctaacatcttgctgggcatgcagacaacggtacacattgcggagctagtcaaggcatgtcatccgtcacccgatgttgtgagcgctgtaggggagcacctgaactggctcaacaaactcttactcccacttaaggaatcgactcagttgcaaggaagcgagtcgtacaaggagtgccttgcactcttgggtcgtgttcacgctgcgatgaagatggtgagaattggcttagtagtgccccagctgcaatacagaatgtacggtagcctcatcaaccaaatggcccaagtagcacaaaactacgaccgagaattcaagcaattcaaattattcatcatccaaaatcaaatccttggcagctatttgctgcagcagaacagggcatttgctgagagggagctgcagatggagagctttcatgctgctgtcatttctcaaagaagggaggagttggacaatacattcgcaaagatggaccgattgagcgggcaaatggaggcagagagtagtgcaatggagcaagccaaaaaggaaatggacgaaggattgaggcagttccagaataggcaagttgcgaacgccctctttgccgttcttagcgctgtagctcagattgggcttgcattccttacggctggtgcaacggctcctggagctgtggcgtcggcggggcaagctgtgagcatagcaggtcaggcggcgcaaggtctgcgaagggtggtggaaattctagagcagctggaggctgtgatggaggttgtggctgctgtgaaggacctcgtggattcattggaacaggtaggtcagattgtggacgcaccggtgatgccggaattgccctcagaggcggactggtccatttttgtgaacgaggtggaggccgtggcagagggcatgccaacggaagtctcggaggttccggtgtggagggccaagtgcaagaatgtggctgcactgggtcgggagatgagcatcacggcagtacagatgtcggagctgcagtatgacatctgggtgcaaggcatgatgcgggatatggctcgaagccaggcagacaggctggccgcaattcaacccgcggaccttaccaactatttggagatggctacccagatggatatgcggactacgaggatgctgctggggctcctcaacatattgcgcatccagaatgcggcgctcaggtacgagtatcttctaatgcccacggagctcacaacatggccactgggtatggataccgtgggtgacttgctcatcgcgcaggagaatgctgcactgataggattaatgcagctagggccctcatctgatttcacgagcaggcatgtggtgaaagacatacctgtgaacttgctgctcgatggcgaggattgggagtttgagattcctgtgcaagctggcatgtccagcttcccttccagctggtctcgcgtccgtattcggcacctggagatgcactttgtgaaggaggccagcggtattggtggtgagattatccaccagcctaccacccagactgggaccgtttacatccttctgcagggttccactatcttccatgaccgcagaagagaccaggtgttgccttttcaggccgctgctccgctcaactaccattacgcgtaccgcctcgacaccggcgactccactctcacaaacgaaccctctgaacagtttgccaacaagttcatgcagatgacacccttcacccgttggaggcttcgtctgtctgcgtccgcaaaagagaatgcaggattagcctttcccacggctacagcacttgactccactacccagattgtcatcactttccatgttacggccatcagacaaattgactggcggcacgacgaagag

SEQ ID NO: 227 - DNA, 2601 bp, synthetic construct
  misc_feature 1..2601: note = PtIP-83 polypeptide variant encoding sequence
  source 1..2601: mol_type = other DNA
atggctctcgtggattacggcaagcttttcgaggatctgaaccagataagcatgggtgtactggatcgggtagagttttcagaggtgatggtgatccacaggatgtatgtgaggctagctgatctgaatgtggggcagctcgagggagccgagaaagtgaggcggttgtatatttttgccgacattctcgagctaccagtcgtggaatggcggtggccgccgcaaataccaggatcggtgacggtgatcatattgtgtcgtcttcttcaatggccaactgatgggaggcagtcggacaccgagctccacctgacattcatgaagttgcatgccatacaacgagaggaaaatcggtgggagataaccgcagcagatggcatgaactggggagtttacatacacgcagaggaagtacaggttggcgtgctgacaatgtcatggtcttcggtacttagagtttcggcacttcgctctgttataacctccggctttcgcgccgttagtgtgtttgaggtaccgggaagtgtaaggtccacccttggagctactttaaggcccgatcacgccttatatagtacaactatgcaagccacacccaacgcatcgcatattagtgcttttaaccttcgcatagtttccccgtcggcatatcgtgtttgtcctctccaaaatgacacagatacctacttaggtattccagcagacgtggcggcagttcttccagtagacgtggtgactgatcctaacatcttgctgggcatgcagacaacggtacacattgcggagctagtcaaggcatgtcatccgtcacccgatgttgtgagcgctgtaggggagcacctgaactggctcaacaaactcttactcccacttaaggaatcgactcagttgcaaggaagcgagtcgtacaaggagtgccttgcactcttgggtcgtgttcacgctgcgatgaagatggtgagaattggcttagtagtgccccagctgcaatacagaatgtacggtagcctcatcaaccaaatggcccaagtagcacaaaactacgaccgagaattcaagcaattcaaattattcatcatccaaaatcaaatccttggcagctatttgctgcagcagaacagggcatttgctgagagggagctgcagatggagagctttcatgctgctgtcatttctcaaagaagggaggagttggacaatacattcgcaaagatggaccgattgagcgggcaaatggaggcagagagtagtgcaatggagcaagccaaaaaggaaatggacgaaggattgaggcagttccagaataggcaagttgcgaacgccctctttgccgttcttagcgctgtagctcagattgggcttgcattccttacggctggtgcaacggctcctggagctgtggcgtcggcggggcaagctgtgagcatagcaggtcaggcggcgcaaggtctgcgaagggtggtggaaattctagagcagctggaggctgtgatggaggttgtggctgctgtgaaggacctcgtggattcattggaacaggtaggtcagattgtggacgcaccggtgatgccggaattgccctcagaggcggactggtccatttttgtgaacgaggtggaggccgtggcagagggcatgccaacggaagtctcggaggttccggtgtggagggccaagtgcaagaatgtggctgcactgggtcgggagatgagcatcacggcagtacagatgtcggagctgcagtatgacatctgggtgcaaggcatgatgcgggatatggctcgaagccaggcagacaggctggccgcaattcaacccgcggaccttaccaactatttggagatggctacccagatggatatgcggactacgaggatgctgctggggctcctcaacatattgcgcatccagaatgcggcgctcaggtacgagtatcttctaatgcccacggagctcacaacatggccactgggtatggataccgtgggtgacttgctcatcgcgcaggagaatgctgcactgataggattaatgcagctagggccctcatctgatttcacgagcaggcatgtggtgaaagacatacctgtgaacttgctgctcgatggcgaggattgggagtttgagattcctgtgcaagctggcatgtccagcttcccttccagctggtctcgcgtccgtattcggcacctggagatgcactttgtgaaggaggccagcggtattggtggtgagattatccaccagcctaccacccagactgggaccgtttacatccttctgcagggttccactatcttccatgaccgcagaagagaccaggtgttgccttttcaggccgctgctccgctcaactaccattacgcgtaccgcctcgacaccggcgactccactctcacaaacgaaccctctgaacagtttgccaacaagttcatgcagatgacacccttcacccgttggaggcttcgtctgtctgcgtccgcaaaagagaatgcaggattagcctttcccacggctacagcacttgactccactacccagattgtcatcactttccatgttacggccatcagacaaattgactggcggcacgacgaagag

SEQ ID NO: 228 - DNA, 2601 bp, synthetic construct
  misc_feature 1..2601: note = PtIP-83 polypeptide variant encoding sequence
  source 1..2601: mol_type = other DNA
atggctctcgtggattacggcaagcttttcgaggatctgaaccagataagcatgggtgtactggatcgggtagagttttcagaggtgatggtgatccacaggatgtatgtgaggctagctgatctgaatgtggggcagctcgagggagccgagaaagtgaggcggttgtatatttttgccgacattgtcgagctaccagtcgtggaatggcggtggccggcgcaaataccaggatcggtgacggtgatcatattgtgtcgtcttcttcaatggccaactgatgggaggcagtcggacaccgagctccacctgacattcatgaagttgcatgccatacaacgagaggaaaatcggtgggagataaccgcagcagatggcatgaactggggagtttacatacacgcagaggaagtacaggttggcgtgctgacaatgtcatggtcttcggtacttagagtttcggcacttcgctctgttataacctccggctttcgcgccgttagtgtgtttgaggtaccgggaagtgtaaggtccacccttggagctactttaaggcccgatcacgccttatatagtacaactatgcaagccacacccaacgcatcgcatattagtgcttttaaccttcgcatagtttccccgtcggcatatcgtgtttgtcctctccaaaatgacacagatacctacttaggtattccagcagacgtggcggcagttcttccagtagacgtggtgactgatcctaacatcttgctgggcatgcagacaacggtacacattgcggagctagtcaaggcatgtcatccgtcacccgatgttgtgagcgctgtaggggagcacctgaactggctcaacaaactcttactcccacttaaggaatcgactcagttgcaaggaagcgagtcgtacaaggagtgccttgcactcttgggtcgtgttcacgctgcgatgaagatggtgagaattggcttagtagtgccccagctgcaatacagaatgtacggtagcctcatcaaccaaatggcccaagtagcacaaaactacgaccgagaattcaagcaattcaaattattcatcatccaaaatcaaatccttggcagctatttgctgcagcagaacagggcatttgctgagagggagctgcagatggagagctttcatgctgctgtcatttctcaaagaagggaggagttggacaatacattcgcaaagatggaccgattgagcgggcaaatggaggcagagagtagtgcaatggagcaagccaaaaaggaaatggacgaaggattgaggcagttccagaataggcaagttgcgaacgccctctttgccgttcttagcgctgtagctcagattgggcttgcattccttacggctggtgcaacggctcctggagctgtggcgtcggcggggcaagctgtgagcatagcaggtcaggcggcgcaaggtctgcgaagggtggtggaaattctagagcagctggaggctgtgatggaggttgtggctgctgtgaaggacctcgtggattcattggaacaggtaggtcagattgtggacgcaccggtgatgccggaattgccctcagaggcggactggtccatttttgtgaacgaggtggaggccgtggcagagggcatgccaacggaagtctcggaggttccggtgtggagggccaagtgcaagaatgtggctgcactgggtcgggagatgagcatcacggcagtacagatgtcggagctgcagtatgacatctgggtgcaaggcatgatgcgggatatggctcgaagccaggcagacaggctggccgcaattcaacccgcggaccttaccaactatttggagatggctacccagatggatatgcggactacgaggatgctgctggggctcctcaacatattgcgcatccagaatgcggcgctcaggtacgagtatcttctaatgcccacggagctcacaacatggccactgggtatggataccgtgggtgacttgctcatcgcgcaggagaatgctgcactgataggattaatgcagctagggccctcatctgatttcacgagcaggcatgtggtgaaagacatacctgtgaacttgctgctcgatggcgaggattgggagtttgagattcctgtgcaagctggcatgtccagcttcccttccagctggtctcgcgtccgtattcggcacctggagatgcactttgtgaaggaggccagcggtattggtggtgagattatccaccagcctaccacccagactgggaccgtttacatccttctgcagggttccactatcttccatgaccgcagaagagaccaggtgttgccttttcaggccgctgctccgctcaactaccattacgcgtaccgcctcgacaccggcgactccactctcacaaacgaaccctctgaacagtttgccaacaagttcatgcagatgacacccttcacccgttggaggcttcgtctgtctgcgtccgcaaaagagaatgcaggattagcctttcccacggctacagcacttgactccactacccagattgtcatcactttccatgttacggccatcagacaaattgactggcggcacgacgaagag

SEQ ID NO: 229 - DNA, 2601 bp, synthetic construct
  misc_feature 1..2601: note = PtIP-83 polypeptide variant encoding sequence
  source 1..2601: mol_type = other DNA
atggctctcgtggattacggcaagcttttcgaggatctgaaccagataagcatgggtgtactggatcgggtagagttttcagaggtgatggtgatccacaggatgtatgtgaggctagctgatctgaatgtggggcagctcgagggagccgagaaagtgaggcgcttgtatatttttggcgacattgtcgagctaccagtcgtggaatggcggtggccgccgcaaataccaggatcggtgacggtgatcatattgtgtcgtcttcttcaatggccaactgatgggaggcagtcggacaccgagctccacctgacattcatgaagttgcatgccatacaacgagaggaaaatcggtgggagataaccgcagcagatggcatgaactggggagtttacatacacgcagaggaagtacaggttggcgtgctgacaatgtcatggtcttcggtacttagagtttcggcacttcgctctgttataacctccggctttcgcgccgttagtgtgtttgaggtaccgggaagtgtaaggtccacccttggagctactttaaggcccgatcacgccttatatagtacaactatgcaagccacacccaacgcatcgcatattagtgcttttaaccttcgcatagtttccccgtcggcatatcgtgtttgtcctctccaaaatgacacagatacctacttaggtattccagcagacgtggcggcagttcttccagtagacgtggtgactgatcctaacatcttgctgggcatgcagacaacggtacacattgcggagctagtcaaggcatgtcatccgtcacccgatgttgtgagcgctgtaggggagcacctgaactggctcaacaaactcttactcccacttaaggaatcgactcagttgcaaggaagcgagtcgtacaaggagtgccttgcactcttgggtcgtgttcacgctgcgatgaagatggtgagaattggcttagtagtgccccagctgcaatacagaatgtacggtagcctcatcaaccaaatggcccaagtagcacaaaactacgaccgagaattcaagcaattcaaattattcatcatccaaaatcaaatccttggcagctatttgctgcagcagaacagggcatttgctgagagggagctgcagatggagagctttcatgctgctgtcatttctcaaagaagggaggagttggacaatacattcgcaaagatggaccgattgagcgggcaaatggaggcagagagtagtgcaatggagcaagccaaaaaggaaatggacgaaggattgaggcagttccagaataggcaagttgcgaacgccctctttgccgttcttagcgctgtagctcagattgggcttgcattccttacggctggtgcaacggctcctggagctgtggcgtcggcggggcaagctgtgagcatagcaggtcaggcggcgcaaggtctgcgaagggtggtggaaattctagagcagctggaggctgtgatggaggttgtggctgctgtgaaggacctcgtggattcattggaacaggtaggtcagattgtggacgcaccggtgatgccggaattgccctcagaggcggactggtccatttttgtgaacgaggtggaggccgtggcagagggcatgccaacggaagtctcggaggttccggtgtggagggccaagtgcaagaatgtggctgcactgggtcgggagatgagcatcacggcagtacagatgtcggagctgcagtatgacatctgggtgcaaggcatgatgcgggatatggctcgaagccaggcagacaggctggccgcaattcaacccgcggaccttaccaactatttggagatggctacccagatggatatgcggactacgaggatgctgctggggctcctcaacatattgcgcatccagaatgcggcgctcaggtacgagtatcttctaatgcccacggagctcacaacatggccactgggtatggataccgtgggtgacttgctcatcgcgcaggagaatgctgcactgataggattaatgcagctagggccctcatctgatttcacgagcaggcatgtggtgaaagacatacctgtgaacttgctgctcgatggcgaggattgggagtttgagattcctgtgcaagctggcatgtccagcttcccttccagctggtctcgcgtccgtattcggcacctggagatgcactttgtgaaggaggccagcggtattggtggtgagattatccaccagcctaccacccagactgggaccgtttacatccttctgcagggttccactatcttccatgaccgcagaagagaccaggtgttgccttttcaggccgctgctccgctcaactaccattacgcgtaccgcctcgacaccggcgactccactctcacaaacgaaccctctgaacagtttgccaacaagttcatgcagatgacacccttcacccgttggaggcttcgtctgtctgcgtccgcaaaagagaatgcaggattagcctttcccacggctacagcacttgactccactacccagattgtcatcactttccatgttacggccatcagacaaattgactggcggcacgacgaagag

SEQ ID NO: 230 - DNA, 2601 bp, synthetic construct
  misc_feature 1..2601: note = PtIP-83 polypeptide variant encoding sequence
  source 1..2601: mol_type = other DNA
atggctctcgtggattacggcaagcttttcgaggatctgaaccagataagcatgggtgtactggatcgggtagagttttcagaggtgatggtgatccacaggatgtatgtgaggctagctgatctgaatgtggggcagctcgagggagccgagaaagtgaggcgcttgtatatttttaccgacattatcgagctaccagtcgtggaatggcggtggccgccgcaaataccaggatcggtgacggtgatcatattgtgtcgtcttcttcaatggccaactgatgggaggcagtcggacaccgagctccacctgacattcatgaagttgcatgccatacaacgagaggaaaatcggtgggagataaccgcagcagatggcatgaactggggagtttacatacacgcagaggaagtacaggttggcgtgctgacaatgtcatggtcttcggtacttagagtttcggcacttcgctctgttataacctccggctttcgcgccgttagtgtgtttgaggtaccgggaagtgtaaggtccacccttggagctactttaaggcccgatcacgccttatatagtacaactatgcaagccacacccaacgcatcgcatattagtgcttttaaccttcgcatagtttccccgtcggcatatcgtgtttgtcctctccaaaatgacacagatacctacttaggtattccagcagacgtggcggcagttcttccagtagacgtggtgactgatcctaacatcttgctgggcatgcagacaacggtacacattgcggagctagtcaaggcatgtcatccgtcacccgatgttgtgagcgctgtaggggagcacctgaactggctcaacaaactcttactcccacttaaggaatcgactcagttgcaaggaagcgagtcgtacaaggagtgccttgcactcttgggtcgtgttcacgctgcgatgaagatggtgagaattggcttagtagtgccccagctgcaatacagaatgtacggtagcctcatcaaccaaatggcccaagtagcacaaaactacgaccgagaattcaagcaattcaaattattcatcatccaaaatcaaatccttggcagctatttgctgcagcagaacagggcatttgctgagagggagctgcagatggagagctttcatgctgctgtcatttctcaaagaagggaggagttggacaatacattcgcaaagatggaccgattgagcgggcaaatggaggcagagagtagtgcaatggagcaagccaaaaaggaaatggacgaaggattgaggcagttccagaataggcaagttgcgaacgccctctttgccgttcttagcgctgtagctcagattgggcttgcattccttacggctggtgcaacggctcctggagctgtggcgtcggcggggcaagctgtgagcatagcaggtcaggcggcgcaaggtctgcgaagggtggtggaaattctagagcagctggaggctgtgatggaggttgtggctgctgtgaaggacctcgtggattcattggaacaggtaggtcagattgtggacgcaccggtgatgccggaattgccctcagaggcggactggtccatttttgtgaacgaggtggaggccgtggcagagggcatgccaacggaagtctcggaggttccggtgtggagggccaagtgcaagaatgtggctgcactgggtcgggagatgagcatcacggcagtacagatgtcggagctgcagtatgacatctgggtgcaaggcatgatgcgggatatggctcgaagccaggcagacaggctggccgcaattcaacccgcggaccttaccaactatttggagatggctacccagatggatatgcggactacgaggatgctgctggggctcctcaacatattgcgcatccagaatgcggcgctcaggtacgagtatcttctaatgcccacggagctcacaacatggccactgggtatggataccgtgggtgacttgctcatcgcgcaggagaatgctgcactgataggattaatgcagctagggccctcatctgatttcacgagcaggcatgtggtgaaagacatacctgtgaacttgctgctcgatggcgaggattgggagtttgagattcctgtgcaagctggcatgtccagcttcccttccagctggtctcgcgtccgtattcggcacctggagatgcactttgtgaaggaggccagcggtattggtggtgagattatccaccagcctaccacccagactgggaccgtttacatccttctgcagggttccactatcttccatgaccgcagaagagaccaggtgttgccttttcaggccgctgctccgctcaactaccattacgcgtaccgcctcgacaccggcgactccactctcacaaacgaaccctctgaacagtttgccaacaagttcatgcagatgacacccttcacccgttggaggcttcgtctgtctgcgtccgcaaaagagaatgcaggattagcctttcccacggctacagcacttgactccactacccagattgtcatcactttccatgttacggccatcagacaaattgactggcggcacgacgaagag

SEQ ID NO: 231 - DNA, 2601 bp, synthetic construct
  misc_feature 1..2601: note = PtIP-83 polypeptide variant encoding sequence
  source 1..2601: mol_type = other DNA
atggctctcgtggattacggcaagcttttcgaggatctgaaccagataagcatgggtgtactggatcgggtagagttttcagaggtgatggtgatccacaggatgtatgtgaggctagctgatctgaatgtggggcagctcgagggagccgagaaagtgaggcgcttgtatgtttttgccgacattatcgacctaccagtcgtggaatggcggtggccgccgcaaataccaggatcggtgacggtgatcatattgtgtcgtcttcttcaatggccaactgatgggaggcagtcggacaccgagctccacctgacattcatgaagttgcatgccatacaacgagaggaaaatcggtgggagataaccgcagcagatggcatgaactggggagtttacatacacgcagaggaagtacaggttggcgtgctgacaatgtcatggtcttcggtacttagagtttcggcacttcgctctgttataacctccggctttcgcgccgttagtgtgtttgaggtaccgggaagtgtaaggtccacccttggagctactttaaggcccgatcacgccttatatagtacaactatgcaagccacacccaacgcatcgcatattagtgcttttaaccttcgcatagtttccccgtcggcatatcgtgtttgtcctctccaaaatgacacagatacctacttaggtattccagcagacgtggcggcagttcttccagtagacgtggtgactgatcctaacatcttgctgggcatgcagacaacggtacacattgcggagctagtcaaggcatgtcatccgtcacccgatgttgtgagcgctgtaggggagcacctgaactggctcaacaaactcttactcccacttaaggaatcgactcagttgcaaggaagcgagtcgtacaaggagtgccttgcactcttgggtcgtgttcacgctgcgatgaagatggtgagaattggcttagtagtgccccagctgcaatacagaatgtacggtagcctcatcaaccaaatggcccaagtagcacaaaactacgaccgagaattcaagcaattcaaattattcatcatccaaaatcaaatccttggcagctatttgctgcagcagaacagggcatttgctgagagggagctgcagatggagagctttcatgctgctgtcatttctcaaagaagggaggagttggacaatacattcgcaaagatggaccgattgagcgggcaaatggaggcagagagtagtgcaatggagcaagccaaaaaggaaatggacgaaggattgaggcagttccagaataggcaagttgcgaacgccctctttgccgttcttagcgctgtagctcagattgggcttgcattccttacggctggtgcaacggctcctggagctgtggcgtcggcggggcaagctgtgagcatagcaggtcaggcggcgcaaggtctgcgaagggtggtggaaattctagagcagctggaggctgtgatggaggttgtggctgctgtgaaggacctcgtggattcattggaacaggtaggtcagattgtggacgcaccggtgatgccggaattgccctcagaggcggactggtccatttttgtgaacgaggtggaggccgtggcagagggcatgccaacggaagtctcggaggttccggtgtggagggccaagtgcaagaatgtggctgcactgggtcgggagatgagcatcacggcagtacagatgtcggagctgcagtatgacatctgggtgcaaggcatgatgcgggatatggctcgaagccaggcagacaggctggccgcaattcaacccgcggaccttaccaactatttggagatggctacccagatggatatgcggactacgaggatgctgctggggctcctcaacatattgcgcatccagaatgcggcgctcaggtacgagtatcttctaatgcccacggagctcacaacatggccactgggtatggataccgtgggtgacttgctcatcgcgcaggagaatgctgcactgataggattaatgcagctagggccctcatctgatttcacgagcaggcatgtggtgaaagacatacctgtgaacttgctgctcgatggcgaggattgggagtttgagattcctgtgcaagctggcatgtccagcttcccttccagctggtctcgcgtccgtattcggcacctggagatgcactttgtgaaggaggccagcggtattggtggtgagattatccaccagcctaccacccagactgggaccgtttacatccttctgcagggttccactatcttccatgaccgcagaagagaccaggtgttgccttttcaggccgctgctccgctcaactaccattacgcgtaccgcctcgacaccggcgactccactctcacaaacgaaccctctgaacagtttgccaacaagttcatgcagatgacacccttcacccgttggaggcttcgtctgtctgcgtccgcaaaagagaatgcaggattagcctttcccacggctacagcacttgactccactacccagattgtcatcactttccatgttacggccatcagacaaattgactggcggcacgacgaagag

SEQ ID NO: 232 - DNA, 2601 bp, synthetic construct
  misc_feature 1..2601: note = PtIP-83 polypeptide variant encoding sequence
  source 1..2601: mol_type = other DNA
atggctctcgtggattacggcaagcttttcgaggatctgaaccagataagcatgggtgtactggatcgggtagagttttcagaggtgatggtgatccacaggatgtatgtgaggctagctgatctgaatgtggggcagctcgagggagccgagaaagtgaggcggttgtatgtttttgccgacattgtcgtgctaccagtcgtggaatggcggtggccgccgcaaataccaggatcggtgacggtgatcatattgtgtcgtcttcttcaatggccaactgatgggaggcagtcggacaccgagctccacctgacattcatgaagttgcatgccatacaacgagaggaaaatcggtgggagataaccgcagcagatggcatgaactggggagtttacatacacgcagaggaagtacaggttggcgtgctgacaatgtcatggtcttcggtacttagagtttcggcacttcgctctgttataacctccggctttcgcgccgttagtgtgtttgaggtaccgggaagtgtaaggtccacccttggagctactttaaggcccgatcacgccttatatagtacaactatgcaagccacacccaacgcatcgcatattagtgcttttaaccttcgcatagtttccccgtcggcatatcgtgtttgtcctctccaaaatgacacagatacctacttaggtattccagcagacgtggcggcagttcttccagtagacgtggtgactgatcctaacatcttgctgggcatgcagacaacggtacacattgcggagctagtcaaggcatgtcatccgtcacccgatgttgtgagcgctgtaggggagcacctgaactggctcaacaaactcttactcccacttaaggaatcgactcagttgcaaggaagcgagtcgtacaaggagtgccttgcactcttgggtcgtgttcacgctgcgatgaagatggtgagaattggcttagtagtgccccagctgcaatacagaatgtacggtagcctcatcaaccaaatggcccaagtagcacaaaactacgaccgagaattcaagcaattcaaattattcatcatccaaaatcaaatccttggcagctatttgctgcagcagaacagggcatttgctgagagggagctgcagatggagagctttcatgctgctgtcatttctcaaagaagggaggagttggacaatacattcgcaaagatggaccgattgagcgggcaaatggaggcagagagtagtgcaatggagcaagccaaaaaggaaatggacgaaggattgaggcagttccagaataggcaagttgcgaacgccctctttgccgttcttagcgctgtagctcagattgggcttgcattccttacggctggtgcaacggctcctggagctgtggcgtcggcggggcaagctgtgagcatagcaggtcaggcggcgcaaggtctgcgaagggtggtggaaattctagagcagctggaggctgtgatggaggttgtggctgctgtgaaggacctcgtggattcattggaacaggtaggtcagattgtggacgcaccggtgatgccggaattgccctcagaggcggactggtccatttttgtgaacgaggtggaggccgtggcagagggcatgccaacggaagtctcggaggttccggtgtggagggccaagtgcaagaatgtggctgcactgggtcgggagatgagcatcacggcagtacagatgtcggagctgcagtatgacatctgggtgcaaggcatgatgcgggatatggctcgaagccaggcagacaggctggccgcaattcaacccgcggaccttaccaactatttggagatggctacccagatggatatgcggactacgaggatgctgctggggctcctcaacatattgcgcatccagaatgcggcgctcaggtacgagtatcttctaatgcccacggagctcacaacatggccactgggtatggataccgtgggtgacttgctcatcgcgcaggagaatgctgcactgataggattaatgcagctagggccctcatctgatttcacgagcaggcatgtggtgaaagacatacctgtgaacttgctgctcgatggcgaggattgggagtttgagattcctgtgcaagctggcatgtccagcttcccttccagctggtctcgcgtccgtattcggcacctggagatgcactttgtgaaggaggccagcggtattggtggtgagattatccaccagcctaccacccagactgggaccgtttacatccttctgcagggttccactatcttccatgaccgcagaagagaccaggtgttgccttttcaggccgctgctccgctcaactaccattacgcgtaccgcctcgacaccggcgactccactctcacaaacgaaccctctgaacagtttgccaacaagttcatgcagatgacacccttcacccgttggaggcttcgtctgtctgcgtccgcaaaagagaatgcaggattagcctttcccacggctacagcacttgactccactacccagattgtcatcactttccatgttacggccatcagacaaattgactggcggcacgacgaagag

SEQ ID NO: 233 - DNA, 2601 bp, synthetic construct
  misc_feature 1..2601: note = PtIP-83 polypeptide variant encoding sequence
  source 1..2601: mol_type = other DNA
atggctctcgtggattacggcaagcttttcgaggatctgaaccagataagcatgggtgtactggatcgggtagagttttcagaggtgatggtgatccacaggatgtatgtgaggctagctgatctgaatgtggggcagctcgagggagccgagaaagtgaggcgcttgtatgttttttgcgacgttgtcgtgctaccagtcgtggaatggcggtggccgccgcaaataccaggatcggtgacggtgatcatattgtgtcgtcttcttcaatggccaactgatgggaggcagtcggacaccgagctccacctgacattcatgaagttgcatgccatacaacgagaggaaaatcggtgggagataaccgcagcagatggcatgaactggggagtttacatacacgcagaggaagtacaggttggcgtgctgacaatgtcatggtcttcggtacttagagtttcggcacttcgctctgttataacctccggctttcgcgccgttagtgtgtttgaggtaccgggaagtgtaaggtccacccttggagctactttaaggcccgatcacgccttatatagtacaactatgcaagccacacccaacgcatcgcatattagtgcttttaaccttcgcatagtttccccgtcggcatatcgtgtttgtcctctccaaaatgacacagatacctacttaggtattccagcagacgtggcggcagttcttccagtagacgtggtgactgatcctaacatcttgctgggcatgcagacaacggtacacattgcggagctagtcaaggcatgtcatccgtcacccgatgttgtgagcgctgtaggggagcacctgaactggctcaacaaactcttactcccacttaaggaatcgactcagttgcaaggaagcgagtcgtacaaggagtgccttgcactcttgggtcgtgttcacgctgcgatgaagatggtgagaattggcttagtagtgccccagctgcaatacagaatgtacggtagcctcatcaaccaaatggcccaagtagcacaaaactacgaccgagaattcaagcaattcaaattattcatcatccaaaatcaaatccttggcagctatttgctgcagcagaacagggcatttgctgagagggagctgcagatggagagctttcatgctgctgtcatttctcaaagaagggaggagttggacaatacattcgcaaagatggaccgattgagcgggcaaatggaggcagagagtagtgcaatggagcaagccaaaaaggaaatggacgaaggattgaggcagttccagaataggcaagttgcgaacgccctctttgccgttcttagcgctgtagctcagattgggcttgcattccttacggctggtgcaacggctcctggagctgtggcgtcggcggggcaagctgtgagcatagcaggtcaggcggcgcaaggtctgcgaagggtggtggaaattctagagcagctggaggctgtgatggaggttgtggctgctgtgaaggacctcgtggattcattggaacaggtaggtcagattgtggacgcaccggtgatgccggaattgccctcagaggcggactggtccatttttgtgaacgaggtggaggccgtggcagagggcatgccaacggaagtctcggaggttccggtgtggagggccaagtgcaagaatgtggctgcactgggtcgggagatgagcatcacggcagtacagatgtcggagctgcagtatgacatctgggtgcaaggcatgatgcgggatatggctcgaagccaggcagacaggctggccgcaattcaacccgcggaccttaccaactatttggagatggctacccagatggatatgcggactacgaggatgctgctggggctcctcaacatattgcgcatccagaatgcggcgctcaggtacgagtatcttctaatgcccacggagctcacaacatggccactgggtatggataccgtgggtgacttgctcatcgcgcaggagaatgctgcactgataggattaatgcagctagggccctcatctgatttcacgagcaggcatgtggtgaaagacatacctgtgaacttgctgctcgatggcgaggattgggagtttgagattcctgtgcaagctggcatgtccagcttcccttccagctggtctcgcgtccgtattcggcacctggagatgcactttgtgaaggaggccagcggtattggtggtgagattatccaccagcctaccacccagactgggaccgtttacatccttctgcagggttccactatcttccatgaccgcagaagagaccaggtgttgccttttcaggccgctgctccgctcaactaccattacgcgtaccgcctcgacaccggcgactccactctcacaaacgaaccctctgaacagtttgccaacaagttcatgcagatgacacccttcacccgttggaggcttcgtctgtctgcgtccgcaaaagagaatgcaggattagcctttcccacggctacagcacttgactccactacccagattgtcatcactttccatgttacggccatcagacaaattgactggcggcacgacgaagag

SEQ ID NO: 234 - DNA, 2601 bp, synthetic construct
  misc_feature 1..2601: note = PtIP-83 polypeptide variant encoding sequence
  source 1..2601: mol_type = other DNA
atggctctcgtggattacggcaagcttttcgaggatctgaaccagataagcatgggtgtactggatcgggtagagttttcagaggtgatggtgatccacaggatgtatgtgaggctagctgatctgaatgtggggcagctcgagggagccgagaaagtgaggcggttgtatgtttttaccgacattatcgagctaccagtcgtggaatggcggtggccgccgcaaataccaggatcggtgacggtgatcatattgtgtcgtcttcttcaatggccaactgatgggaggcagtcggacaccgagctccacctgacattcatgaagttgcatgccatacaacgagaggaaaatcggtgggagataaccgcagcagatggcatgaactggggagtttacatacacgcagaggaagtacaggttggcgtgctgacaatgtcatggtcttcggtacttagagtttcggcacttcgctctgttataacctccggctttcgcgccgttagtgtgtttgaggtaccgggaagtgtaaggtccacccttggagctactttaaggcccgatcacgccttatatagtacaactatgcaagccacacccaacgcatcgcatattagtgcttttaaccttcgcatagtttccccgtcggcatatcgtgtttgtcctctccaaaatgacacagatacctacttaggtattccagcagacgtggcggcagttcttccagtagacgtggtgactgatcctaacatcttgctgggcatgcagacaacggtacacattgcggagctagtcaaggcatgtcatccgtcacccgatgttgtgagcgctgtaggggagcacctgaactggctcaacaaactcttactcccacttaaggaatcgactcagttgcaaggaagcgagtcgtacaaggagtgccttgcactcttgggtcgtgttcacgctgcgatgaagatggtgagaattggcttagtagtgccccagctgcaatacagaatgtacggtagcctcatcaaccaaatggcccaagtagcacaaaactacgaccgagaattcaagcaattcaaattattcatcatccaaaatcaaatccttggcagctatttgctgcagcagaacagggcatttgctgagagggagctgcagatggagagctttcatgctgctgtcatttctcaaagaagggaggagttggacaatacattcgcaaagatggaccgattgagcgggcaaatggaggcagagagtagtgcaatggagcaagccaaaaaggaaatggacgaaggattgaggcagttccagaataggcaagttgcgaacgccctctttgccgttcttagcgctgtagctcagattgggcttgcattccttacggctggtgcaacggctcctggagctgtggcgtcggcggggcaagctgtgagcatagcaggtcaggcggcgcaaggtctgcgaagggtggtggaaattctagagcagctggaggctgtgatggaggttgtggctgctgtgaaggacctcgtggattcattggaacaggtaggtcagattgtggacgcaccggtgatgccggaattgccctcagaggcggactggtccatttttgtgaacgaggtggaggccgtggcagagggcatgccaacggaagtctcggaggttccggtgtggagggccaagtgcaagaatgtggctgcactgggtcgggagatgagcatcacggcagtacagatgtcggagctgcagtatgacatctgggtgcaaggcatgatgcgggatatggctcgaagccaggcagacaggctggccgcaattcaacccgcggaccttaccaactatttggagatggctacccagatggatatgcggactacgaggatgctgctggggctcctcaacatattgcgcatccagaatgcggcgctcaggtacgagtatcttctaatgcccacggagctcacaacatggccactgggtatggataccgtgggtgacttgctcatcgcgcaggagaatgctgcactgataggattaatgcagctagggccctcatctgatttcacgagcaggcatgtggtgaaagacatacctgtgaacttgctgctcgatggcgaggattgggagtttgagattcctgtgcaagctggcatgtccagcttcccttccagctggtctcgcgtccgtattcggcacctggagatgcactttgtgaaggaggccagcggtattggtggtgagattatccaccagcctaccacccagactgggaccgtttacatccttctgcagggttccactatcttccatgaccgcagaagagaccaggtgttgccttttcaggccgctgctccgctcaactaccattacgcgtaccgcctcgacaccggcgactccactctcacaaacgaaccctctgaacagtttgccaacaagttcatgcagatgacacccttcacccgttggaggcttcgtctgtctgcgtccgcaaaagagaatgcaggattagcctttcccacggctacagcacttgactccactacccagattgtcatcactttccatgttacggccatcagacaaattgactggcggcacgacgaagag

SEQ ID NO: 235 - DNA, 2601 bp, synthetic construct
  misc_feature 1..2601: note = PtIP-83 polypeptide variant encoding sequence
  source 1..2601: mol_type = other DNA
atggctctcgtggattacggcaagcttttcgaggatctgaaccagataagcatgggtgtactggatcgggtagagttttcagaggtgatggtgatccacaggatgtatgtgaggctagctgatctgaatgtggggcagctcgagggagccgagaaagtgaggcggttgtatgtttttaccgacgttctcgtgctaccagtcgtggaatggcggtggccgccgcaaataccaggatcggtgacggtgatcatattgtgtcgtcttcttcaatggccaactgatgggaggcagtcggacaccgagctccacctgacattcatgaagttgcatgccatacaacgagaggaaaatcggtgggagataaccgcagcagatggcatgaactggggagtttacatacacgcagaggaagtacaggttggcgtgctgacaatgtcatggtcttcggtacttagagtttcggcacttcgctctgttataacctccggctttcgcgccgttagtgtgtttgaggtaccgggaagtgtaaggtccacccttggagctactttaaggcccgatcacgccttatatagtacaactatgcaagccacacccaacgcatcgcatattagtgcttttaaccttcgcatagtttccccgtcggcatatcgtgtttgtcctctccaaaatgacacagatacctacttaggtattccagcagacgtggcggcagttcttccagtagacgtggtgactgatcctaacatcttgctgggcatgcagacaacggtacacattgcggagctagtcaaggcatgtcatccgtcacccgatgttgtgagcgctgtaggggagcacctgaactggctcaacaaactcttactcccacttaaggaatcgactcagttgcaaggaagcgagtcgtacaaggagtgccttgcactcttgggtcgtgttcacgctgcgatgaagatggtgagaattggcttagtagtgccccagctgcaatacagaatgtacggtagcctcatcaaccaaatggcccaagtagcacaaaactacgaccgagaattcaagcaattcaaattattcatcatccaaaatcaaatccttggcagctatttgctgcagcagaacagggcatttgctgagagggagctgcagatggagagctttcatgctgctgtcatttctcaaagaagggaggagttggacaatacattcgcaaagatggaccgattgagcgggcaaatggaggcagagagtagtgcaatggagcaagccaaaaaggaaatggacgaaggattgaggcagttccagaataggcaagttgcgaacgccctctttgccgttcttagcgctgtagctcagattgggcttgcattccttacggctggtgcaacggctcctggagctgtggcgtcggcggggcaagctgtgagcatagcaggtcaggcggcgcaaggtctgcgaagggtggtggaaattctagagcagctggaggctgtgatggaggttgtggctgctgtgaaggacctcgtggattcattggaacaggtaggtcagattgtggacgcaccggtgatgccggaattgccctcagaggcggactggtccatttttgtgaacgaggtggaggccgtggcagagggcatgccaacggaagtctcggaggttccggtgtggagggccaagtgcaagaatgtggctgcactgggtcgggagatgagcatcacggcagtacagatgtcggagctgcagtatgacatctgggtgcaaggcatgatgcgggatatggctcgaagccaggcagacaggctggccgcaattcaacccgcggaccttaccaactatttggagatggctacccagatggatatgcggactacgaggatgctgctggggctcctcaacatattgcgcatccagaatgcggcgctcaggtacgagtatcttctaatgcccacggagctcacaacatggccactgggtatggataccgtgggtgacttgctcatcgcgcaggagaatgctgcactgataggattaatgcagctagggccctcatctgatttcacgagcaggcatgtggtgaaagacatacctgtgaacttgctgctcgatggcgaggattgggagtttgagattcctgtgcaagctggcatgtccagcttcccttccagctggtctcgcgtccgtattcggcacctggagatgcactttgtgaaggaggccagcggtattggtggtgagattatccaccagcctaccacccagactgggaccgtttacatccttctgcagggttccactatcttccatgaccgcagaagagaccaggtgttgccttttcaggccgctgctccgctcaactaccattacgcgtaccgcctcgacaccggcgactccactctcacaaacgaaccctctgaacagtttgccaacaagttcatgcagatgacacccttcacccgttggaggcttcgtctgtctgcgtccgcaaaagagaatgcaggattagcctttcccacggctacagcacttgactccactacccagattgtcatcactttccatgttacggccatcagacaaattgactggcggcacgacgaagag

SEQ ID NO: 236 - protein, 867 aa, synthetic construct
  REGION 1..867: note = PtIP-83 polypeptide variant
MALVDYGKLFEDLNQISMGVLDRVEFSEVMVIHRMYVRLADLNVGQLEGAEKVKHLYIFCDVIELPVVEWRWPPQIPGSVTVIILCRLLQWPTDGRQSDTELHLTFMKLHAIQREENRWEITAADGMNWGVYIHAEEVQVGVLTMSWSSVLRVSALRSVITSGFRAVSVFEVPGSVRSTLGATLRPDHALYSTTMQATPNASHISAFNLRIVSPSAYRVCPLQNDTDTYLGIPADVAAVLPVDVVTDPNILLGMQTTVHIAELVKACHPSPDVVSAVGEHLNWLNKLLLPLKESTQLQGSESYKECLALLGRVHAAMKMVRIGLVVPQLQYRMYGSLINQMAQVAQNYDREFKQFKLFIIQNQILGSYLLQQNRAFAERELQMESFHAAVISQRREELDNTFAKMDRLSGQMEAESSAMEQAKKEMDEGLRQFQNRQVANALFAVLSAVAQIGLAFLTAGATAPGAVASAGQAVSIAGQAAQGLRRVVEILEQLEAVMEVVAAVKDLVDSLEQVGQIVDAPVMPELPSEADWSIFVNEVEAVAEGMPTEVSEVPVWRAKCKNVAALGREMSITAVQMSELQYDIWVQGMMRDMARSQADRLAAIQPADLTNYLEMATQMDMRTTRMLLGLLNILRIQNAALRYEYLLMPTELTTWPLGMDTVGDLLIAQENAALIGLMQLGPSSDFTSRHVVKDIPVNLLLDGEDWEFEIPVQAGMSSFPSSWSRVRIRHLEMHFVKEASGIGGEIIHQPTTQTGTVYILLQGSTIFHDRRRDQVLPFQAAAPLNYHYAYRLDTGDSTLTNEPSEQFANKFMQMTPFTRWRLRLSASAKENAGLAFPTATALDSTTQIVITFHVTAIRQIDWRHDEE

SEQ ID NO: 237 - protein, 867 aa, synthetic construct
  REGION 1..867: note = PtIP-83 polypeptide variant
MALVDYGKLFEDLNQISMGVLDRVEFSEVMVIHRMYVRLADLNVGQLEGAEKVKHLYIFCDVVELPVVEWRWPPQIPGSVTVIILCRLLQWPTDGRQSDTELHLTFMKLHAIQREENRWEITAADGMNWGVYIHAEEVQVGVLTMSWSSVLRVSALRSVITSGFRAVSVFEVPGSVRSTLGATLRPDHALYSTTMQATPNASHISAFNLRIVSPSAYRVCPLQNDTDTYLGIPADVAAVLPVDVVTDPNILLGMQTTVHIAELVKACHPSPDVVSAVGEHLNWLNKLLLPLKESTQLQGSESYKECLALLGRVHAAMKMVRIGLVVPQLQYRMYGSLINQMAQVAQNYDREFKQFKLFIIQNQILGSYLLQQNRAFAERELQMESFHAAVISQRREELDNTFAKMDRLSGQMEAESSAMEQAKKEMDEGLRQFQNRQVANALFAVLSAVAQIGLAFLTAGATAPGAVASAGQAVSIAGQAAQGLRRVVEILEQLEAVMEVVAAVKDLVDSLEQVGQIVDAPVMPELPSEADWSIFVNEVEAVAEGMPTEVSEVPVWRAKCKNVAALGREMSITAVQMSELQYDIWVQGMMRDMARSQADRLAAIQPADLTNYLEMATQMDMRTTRMLLGLLNILRIQNAALRYEYLLMPTELTTWPLGMDTVGDLLIAQENAALIGLMQLGPSSDFTSRHVVKDIPVNLLLDGEDWEFEIPVQAGMSSFPSSWSRVRIRHLEMHFVKEASGIGGEIIHQPTTQTGTVYILLQGSTIFHDRRRDQVLPFQAAAPLNYHYAYRLDTGDSTLTNEPSEQFANKFMQMTPFTRWRLRLSASAKENAGLAFPTATALDSTTQIVITFHVTAIRQIDWRHDEE

SEQ ID NO: 238 - protein, 867 aa, synthetic construct
  REGION 1..867: note = PtIP-83 polypeptide variant
MALVDYGKLFEDLNQISMGVLDRVEFSEVMVIHRMYVRLADLNVGQLEGAEKVKHLYIFSDIIELPVVEWRWPPQIPGSVTVIILCRLLQWPTDGRQSDTELHLTFMKLHAIQREENRWEITAADGMNWGVYIHAEEVQVGVLTMSWSSVLRVSALRSVITSGFRAVSVFEVPGSVRSTLGATLRPDHALYSTTMQATPNASHISAFNLRIVSPSAYRVCPLQNDTDTYLGIPADVAAVLPVDVVTDPNILLGMQTTVHIAELVKACHPSPDVVSAVGEHLNWLNKLLLPLKESTQLQGSESYKECLALLGRVHAAMKMVRIGLVVPQLQYRMYGSLINQMAQVAQNYDREFKQFKLFIIQNQILGSYLLQQNRAFAERELQMESFHAAVISQRREELDNTFAKMDRLSGQMEAESSAMEQAKKEMDEGLRQFQNRQVANALFAVLSAVAQIGLAFLTAGATAPGAVASAGQAVSIAGQAAQGLRRVVEILEQLEAVMEVVAAVKDLVDSLEQVGQIVDAPVMPELPSEADWSIFVNEVEAVAEGMPTEVSEVPVWRAKCKNVAALGREMSITAVQMSELQYDIWVQGMMRDMARSQADRLAAIQPADLTNYLEMATQMDMRTTRMLLGLLNILRIQNAALRYEYLLMPTELTTWPLGMDTVGDLLIAQENAALIGLMQLGPSSDFTSRHVVKDIPVNLLLDGEDWEFEIPVQAGMSSFPSSWSRVRIRHLEMHFVKEASGIGGEIIHQPTTQTGTVYILLQGSTIFHDRRRDQVLPFQAAAPLNYHYAYRLDTGDSTLTNEPSEQFANKFMQMTPFTRWRLRLSASAKENAGLAFPTATALDSTTQIVITFHVTAIRQIDWRHDEE

SEQ ID NO: 239 - protein, 867 aa, synthetic construct
  REGION 1..867: note = PtIP-83 polypeptide variant
MALVDYGKLFEDLNQISMGVLDRVEFSEVMVIHRMYVRLADLNVGQLEGAEKVKHLYIFTDVLELPVVEWRWPPQIPGSVTVIILCRLLQWPTDGRQSDTELHLTFMKLHAIQREENRWEITAADGMNWGVYIHAEEVQVGVLTMSWSSVLRVSALRSVITSGFRAVSVFEVPGSVRSTLGATLRPDHALYSTTMQATPNASHISAFNLRIVSPSAYRVCPLQNDTDTYLGIPADVAAVLPVDVVTDPNILLGMQTTVHIAELVKACHPSPDVVSAVGEHLNWLNKLLLPLKESTQLQGSESYKECLALLGRVHAAMKMVRIGLVVPQLQYRMYGSLINQMAQVAQNYDREFKQFKLFIIQNQILGSYLLQQNRAFAERELQMESFHAAVISQRREELDNTFAKMDRLSGQMEAESSAMEQAKKEMDEGLRQFQNRQVANALFAVLSAVAQIGLAFLTAGATAPGAVASAGQAVSIAGQAAQGLRRVVEILEQLEAVMEVVAAVKDLVDSLEQVGQIVDAPVMPELPSEADWSIFVNEVEAVAEGMPTEVSEVPVWRAKCKNVAALGREMSITAVQMSELQYDIWVQGMMRDMARSQADRLAAIQPADLTNYLEMATQMDMRTTRMLLGLLNILRIQNAALRYEYLLMPTELTTWPLGMDTVGDLLIAQENAALIGLMQLGPSSDFTSRHVVKDIPVNLLLDGEDWEFEIPVQAGMSSFPSSWSRVRIRHLEMHFVKEASGIGGEIIHQPTTQTGTVYILLQGSTIFHDRRRDQVLPFQAAAPLNYHYAYRLDTGDSTLTNEPSEQFANKFMQMTPFTRWRLRLSASAKENAGLAFPTATALDSTTQIVITFHVTAIRQIDWRHDEE

SEQ ID NO: 240 - protein, 867 aa, synthetic construct
  REGION 1..867: note = PtIP-83 polypeptide variant
MALVDYGKLFEDLNQISMGVLDRVEFSEVMVIHRMYVRLADLNVGQLEGAEKVKHLYVFADIIVLPVVEWRWPPQIPGSVTVIILCRLLQWPTDGRQSDTELHLTFMKLHAIQREENRWEITAADGMNWGVYIHAEEVQVGVLTMSWSSVLRVSALRSVITSGFRAVSVFEVPGSVRSTLGATLRPDHALYSTTMQATPNASHISAFNLRIVSPSAYRVCPLQNDTDTYLGIPADVAAVLPVDVVTDPNILLGMQTTVHIAELVKACHPSPDVVSAVGEHLNWLNKLLLPLKESTQLQGSESYKECLALLGRVHAAMKMVRIGLVVPQLQYRMYGSLINQMAQVAQNYDREFKQFKLFIIQNQILGSYLLQQNRAFAERELQMESFHAAVISQRREELDNTFAKMDRLSGQMEAESSAMEQAKKEMDEGLRQFQNRQVANALFAVLSAVAQIGLAFLTAGATAPGAVASAGQAVSIAGQAAQGLRRVVEILEQLEAVMEVVAAVKDLVDSLEQVGQIVDAPVMPELPSEADWSIFVNEVEAVAEGMPTEVSEVPVWRAKCKNVAALGREMSITAVQMSELQYDIWVQGMMRDMARSQADRLAAIQPADLTNYLEMATQMDMRTTRMLLGLLNILRIQNAALRYEYLLMPTELTTWPLGMDTVGDLLIAQENAALIGLMQLGPSSDFTSRHVVKDIPVNLLLDGEDWEFEIPVQAGMSSFPSSWSRVRIRHLEMHFVKEASGIGGEIIHQPTTQTGTVYILLQGSTIFHDRRRDQVLPFQAAAPLNYHYAYRLDTGDSTLTNEPSEQFANKFMQMTPFTRWRLRLSASAKENAGLAFPTATALDSTTQIVITFHVTAIRQIDWRHDEE

SEQ ID NO: 241 - protein, 867 aa, synthetic construct
  REGION 1..867: note = PtIP-83 polypeptide variant
MALVDYGKLFEDLNQISMGVLDRVEFSEVMVIHRMYVRLADLNVGQLEGAEKVKHLYVFADVIELPVVEWRWPPQIPGSVTVIILCRLLQWPTDGRQSDTELHLTFMKLHAIQREENRWEITAADGMNWGVYIHAEEVQVGVLTMSWSSVLRVSALRSVITSGFRAVSVFEVPGSVRSTLGATLRPDHALYSTTMQATPNASHISAFNLRIVSPSAYRVCPLQNDTDTYLGIPADVAAVLPVDVVTDPNILLGMQTTVHIAELVKACHPSPDVVSAVGEHLNWLNKLLLPLKESTQLQGSESYKECLALLGRVHAAMKMVRIGLVVPQLQYRMYGSLINQMAQVAQNYDREFKQFKLFIIQNQILGSYLLQQNRAFAERELQMESFHAAVISQRREELDNTFAKMDRLSGQMEAESSAMEQAKKEMDEGLRQFQNRQVANALFAVLSAVAQIGLAFLTAGATAPGAVASAGQAVSIAGQAAQGLRRVVEILEQLEAVMEVVAAVKDLVDSLEQVGQIVDAPVMPELPSEADWSIFVNEVEAVAEGMPTEVSEVPVWRAKCKNVAALGREMSITAVQMSELQYDIWVQGMMRDMARSQADRLAAIQPADLTNYLEMATQMDMRTTRMLLGLLNILRIQNAALRYEYLLMPTELTTWPLGMDTVGDLLIAQENAALIGLMQLGPSSDFTSRHVVKDIPVNLLLDGEDWEFEIPVQAGMSSFPSSWSRVRIRHLEMHFVKEASGIGGEIIHQPTTQTGTVYILLQGSTIFHDRRRDQVLPFQAAAPLNYHYAYRLDTGDSTLTNEPSEQFANKFMQMTPFTRWRLRLSASAKENAGLAFPTATALDSTTQIVITFHVTAIRQIDWRHDEE

SEQ ID NO: 242 - protein, 867 aa, synthetic construct
  REGION 1..867: note = PtIP-83 polypeptide variant
MALVDYGKLFEDLNQISMGVLDRVEFSEVMVIHRMYVRLADLNVGQLEGAEKVKHLYVFGDVIELPVVEWRWPPQIPGSVTVIILCRLLQWPTDGRQSDTELHLTFMKLHAIQREENRWEITAADGMNWGVYIHAEEVQVGVLTMSWSSVLRVSALRSVITSGFRAVSVFEVPGSVRSTLGATLRPDHALYSTTMQATPNASHISAFNLRIVSPSAYRVCPLQNDTDTYLGIPADVAAVLPVDVVTDPNILLGMQTTVHIAELVKACHPSPDVVSAVGEHLNWLNKLLLPLKESTQLQGSESYKECLALLGRVHAAMKMVRIGLVVPQLQYRMYGSLINQMAQVAQNYDREFKQFKLFIIQNQILGSYLLQQNRAFAERELQMESFHAAVISQRREELDNTFAKMDRLSGQMEAESSAMEQAKKEMDEGLRQFQNRQVANALFAVLSAVAQIGLAFLTAGATAPGAVASAGQAVSIAGQAAQGLRRVVEILEQLEAVMEVVAAVKDLVDSLEQVGQIVDAPVMPELPSEADWSIFVNEVEAVAEGMPTEVSEVPVWRAKCKNVAALGREMSITAVQMSELQYDIWVQGMMRDMARSQADRLAAIQPADLTNYLEMATQMDMRTTRMLLGLLNILRIQNAALRYEYLLMPTELTTWPLGMDTVGDLLIAQENAALIGLMQLGPSSDFTSRHVVKDIPVNLLLDGEDWEFEIPVQAGMSSFPSSWSRVRIRHLEMHFVKEASGIGGEIIHQPTTQTGTVYILLQGSTIFHDRRRDQVLPFQAAAPLNYHYAYRLDTGDSTLTNEPSEQFANKFMQMTPFTRWRLRLSASAKENAGLAFPTATALDSTTQIVITFHVTAIRQIDWRHDEE

SEQ ID NO: 243 - protein, 867 aa, synthetic construct
  REGION 1..867: note = PtIP-83 polypeptide variant
MALVDYGKLFEDLNQISMGVLDRVEFSEVMVIHRMYVRLADLNVGQLEGAEKVKHLYVFSDVIELPVVEWRWPPQIPGSVTVIILCRLLQWPTDGRQSDTELHLTFMKLHAIQREENRWEITAADGMNWGVYIHAEEVQVGVLTMSWSSVLRVSALRSVITSGFRAVSVFEVPGSVRSTLGATLRPDHALYSTTMQATPNASHISAFNLRIVSPSAYRVCPLQNDTDTYLGIPADVAAVLPVDVVTDPNILLGMQTTVHIAELVKACHPSPDVVSAVGEHLNWLNKLLLPLKESTQLQGSESYKECLALLGRVHAAMKMVRIGLVVPQLQYRMYGSLINQMAQVAQNYDREFKQFKLFIIQNQILGSYLLQQNRAFAERELQMESFHAAVISQRREELDNTFAKMDRLSGQMEAESSAMEQAKKEMDEGLRQFQNRQVANALFAVLSAVAQIGLAFLTAGATAPGAVASAGQAVSIAGQAAQGLRRVVEILEQLEAVMEVVAAVKDLVDSLEQVGQIVDAPVMPELPSEADWSIFVNEVEAVAEGMPTEVSEVPVWRAKCKNVAALGREMSITAVQMSELQYDIWVQGMMRDMARSQADRLAAIQPADLTNYLEMATQMDMRTTRMLLGLLNILRIQNAALRYEYLLMPTELTTWPLGMDTVGDLLIAQENAALIGLMQLGPSSDFTSRHVVKDIPVNLLLDGEDWEFEIPVQAGMSSFPSSWSRVRIRHLEMHFVKEASGIGGEIIHQPTTQTGTVYILLQGSTIFHDRRRDQVLPFQAAAPLNYHYAYRLDTGDSTLTNEPSEQFANKFMQMTPFTRWRLRLSASAKENAGLAFPTATALDSTTQIVITFHVTAIRQIDWRHDEE

SEQ ID NO: 244 - protein, 867 aa, synthetic construct
  REGION 1..867: note = PtIP-83 polypeptide variant
MALVDYGKLFEDLNQISMGVLDRVEFSEVMVIHRMYVRLADLNVGQLEGAEKVKHLYVFSDVLVLPVVEWRWPPQIPGSVTVIILCRLLQWPTDGRQSDTELHLTFMKLHAIQREENRWEITAADGMNWGVYIHAEEVQVGVLTMSWSSVLRVSALRSVITSGFRAVSVFEVPGSVRSTLGATLRPDHALYSTTMQATPNASHISAFNLRIVSPSAYRVCPLQNDTDTYLGIPADVAAVLPVDVVTDPNILLGMQTTVHIAELVKACHPSPDVVSAVGEHLNWLNKLLLPLKESTQLQGSESYKECLALLGRVHAAMKMVRIGLVVPQLQYRMYGSLINQMAQVAQNYDREFKQFKLFIIQNQILGSYLLQQNRAFAERELQMESFHAAVISQRREELDNTFAKMDRLSGQMEAESSAMEQAKKEMDEGLRQFQNRQVANALFAVLSAVAQIGLAFLTAGATAPGAVASAGQAVSIAGQAAQGLRRVVEILEQLEAVMEVVAAVKDLVDSLEQVGQIVDAPVMPELPSEADWSIFVNEVEAVAEGMPTEVSEVPVWRAKCKNVAALGREMSITAVQMSELQYDIWVQGMMRDMARSQADRLAAIQPADLTNYLEMATQMDMRTTRMLLGLLNILRIQNAALRYEYLLMPTELTTWPLGMDTVGDLLIAQENAALIGLMQLGPSSDFTSRHVVKDIPVNLLLDGEDWEFEIPVQAGMSSFPSSWSRVRIRHLEMHFVKEASGIGGEIIHQPTTQTGTVYILLQGSTIFHDRRRDQVLPFQAAAPLNYHYAYRLDTGDSTLTNEPSEQFANKFMQMTPFTRWRLRLSASAKENAGLAFPTATALDSTTQIVITFHVTAIRQIDWRHDEE

SEQ ID NO: 245 - protein, 867 aa, synthetic construct
  REGION 1..867: note = PtIP-83 polypeptide variant
MALVDYGKLFEDLNQISMGVLDRVEFSEVMVIHRMYVRLADLNVGQLEGAEKVKQLIIFSDIIELPVVEWRWPPQIPGSVTVIILCRLLQWPTDGRQSDTELHLTFMKLHAIQREENRWEITAADGMNWGVYIHAEEVQVGVLTMSWSSVLRVSALRSVITSGFRAVSVFEVPGSVRSTLGATLRPDHALYSTTMQATPNASHISAFNLRIVSPSAYRVCPLQNDTDTYLGIPADVAAVLPVDVVTDPNILLGMQTTVHIAELVKACHPSPDVVSAVGEHLNWLNKLLLPLKESTQLQGSESYKECLALLGRVHAAMKMVRIGLVVPQLQYRMYGSLINQMAQVAQNYDREFKQFKLFIIQNQILGSYLLQQNRAFAERELQMESFHAAVISQRREELDNTFAKMDRLSGQMEAESSAMEQAKKEMDEGLRQFQNRQVANALFAVLSAVAQIGLAFLTAGATAPGAVASAGQAVSIAGQAAQGLRRVVEILEQLEAVMEVVAAVKDLVDSLEQVGQIVDAPVMPELPSEADWSIFVNEVEAVAEGMPTEVSEVPVWRAKCKNVAALGREMSITAVQMSELQYDIWVQGMMRDMARSQADRLAAIQPADLTNYLEMATQMDMRTTRMLLGLLNILRIQNAALRYEYLLMPTELTTWPLGMDTVGDLLIAQENAALIGLMQLGPSSDFTSRHVVKDIPVNLLLDGEDWEFEIPVQAGMSSFPSSWSRVRIRHLEMHFVKEASGIGGEIIHQPTTQTGTVYILLQGSTIFHDRRRDQVLPFQAAAPLNYHYAYRLDTGDSTLTNEPSEQFANKFMQMTPFTRWRLRLSASAKENAGLAFPTATALDSTTQIVITFHVTAIRQIDWRHDEE

SEQ ID NO: 246 - protein, 867 aa, synthetic construct
  REGION 1..867: note = PtIP-83 polypeptide variant
MALVDYGKLFEDLNQISMGVLDRVEFSEVMVIHRMYVRLADLNVGQLEGAEKVKQLYIFCDIIELPVVEWRWPPQIPGSVTVIILCRLLQWPTDGRQSDTELHLTFMKLHAIQREENRWEITAADGMNWGVYIHAEEVQVGVLTMSWSSVLRVSALRSVITSGFRAVSVFEVPGSVRSTLGATLRPDHALYSTTMQATPNASHISAFNLRIVSPSAYRVCPLQNDTDTYLGIPADVAAVLPVDVVTDPNILLGMQTTVHIAELVKACHPSPDVVSAVGEHLNWLNKLLLPLKESTQLQGSESYKECLALLGRVHAAMKMVRIGLVVPQLQYRMYGSLINQMAQVAQNYDREFKQFKLFIIQNQILGSYLLQQNRAFAERELQMESFHAAVISQRREELDNTFAKMDRLSGQMEAESSAMEQAKKEMDEGLRQFQNRQVANALFAVLSAVAQIGLAFLTAGATAPGAVASAGQAVSIAGQAAQGLRRVVEILEQLEAVMEVVAAVKDLVDSLEQVGQIVDAPVMPELPSEADWSIFVNEVEAVAEGMPTEVSEVPVWRAKCKNVAALGREMSITAVQMSELQYDIWVQGMMRDMARSQADRLAAIQPADLTNYLEMATQMDMRTTRMLLGLLNILRIQNAALRYEYLLMPTELTTWPLGMDTVGDLLIAQENAALIGLMQLGPSSDFTSRHVVKDIPVNLLLDGEDWEFEIPVQAGMSSFPSSWSRVRIRHLEMHFVKEASGIGGEIIHQPTTQTGTVYILLQGSTIFHDRRRDQVLPFQAAAPLNYHYAYRLDTGDSTLTNEPSEQFANKFMQMTPFTRWRLRLSASAKENAGLAFPTATALDSTTQIVITFHVTAIRQIDWRHDEE

SEQ ID NO: 247 - protein, 867 aa, synthetic construct
  REGION 1..867: note = PtIP-83 polypeptide variant
MALVDYGKLFEDLNQISMGVLDRVEFSEVMVIHRMYVRLADLNVGQLEGAEKVKQLYIFCDVLELPVVEWRWPPQIPGSVTVIILCRLLQWPTDGRQSDTELHLTFMKLHAIQREENRWEITAADGMNWGVYIHAEEVQVGVLTMSWSSVLRVSALRSVITSGFRAVSVFEVPGSVRSTLGATLRPDHALYSTTMQATPNASHISAFNLRIVSPSAYRVCPLQNDTDTYLGIPADVAAVLPVDVVTDPNILLGMQTTVHIAELVKACHPSPDVVSAVGEHLNWLNKLLLPLKESTQLQGSESYKECLALLGRVHAAMKMVRIGLVVPQLQYRMYGSLINQMAQVAQNYDREFKQFKLFIIQNQILGSYLLQQNRAFAERELQMESFHAAVISQRREELDNTFAKMDRLSGQMEAESSAMEQAKKEMDEGLRQFQNRQVANALFAVLSAVAQIGLAFLTAGATAPGAVASAGQAVSIAGQAAQGLRRVVEILEQLEAVMEVVAAVKDLVDSLEQVGQIVDAPVMPELPSEADWSIFVNEVEAVAEGMPTEVSEVPVWRAKCKNVAALGREMSITAVQMSELQYDIWVQGMMRDMARSQADRLAAIQPADLTNYLEMATQMDMRTTRMLLGLLNILRIQNAALRYEYLLMPTELTTWPLGMDTVGDLLIAQENAALIGLMQLGPSSDFTSRHVVKDIPVNLLLDGEDWEFEIPVQAGMSSFPSSWSRVRIRHLEMHFVKEASGIGGEIIHQPTTQTGTVYILLQGSTIFHDRRRDQVLPFQAAAPLNYHYAYRLDTGDSTLTNEPSEQFANKFMQMTPFTRWRLRLSASAKENAGLAFPTATALDSTTQIVITFHVTAIRQIDWRHDEE

SEQ ID NO: 248 - protein, 867 aa, synthetic construct
  REGION 1..867: note = PtIP-83 polypeptide variant
MALVDYGKLFEDLNQISMGVLDRVEFSEVMVIHRMYVRLADLNVGQLEGAEKVKQLYIFGDVIELPVVEWRWPPQIPGSVTVIILCRLLQWPTDGRQSDTELHLTFMKLHAIQREENRWEITAADGMNWGVYIHAEEVQVGVLTMSWSSVLRVSALRSVITSGFRAVSVFEVPGSVRSTLGATLRPDHALYSTTMQATPNASHISAFNLRIVSPSAYRVCPLQNDTDTYLGIPADVAAVLPVDVVTDPNILLGMQTTVHIAELVKACHPSPDVVSAVGEHLNWLNKLLLPLKESTQLQGSESYKECLALLGRVHAAMKMVRIGLVVPQLQYRMYGSLINQMAQVAQNYDREFKQFKLFIIQNQILGSYLLQQNRAFAERELQMESFHAAVISQRREELDNTFAKMDRLSGQMEAESSAMEQAKKEMDEGLRQFQNRQVANALFAVLSAVAQIGLAFLTAGATAPGAVASAGQAVSIAGQAAQGLRRVVEILEQLEAVMEVVAAVKDLVDSLEQVGQIVDAPVMPELPSEADWSIFVNEVEAVAEGMPTEVSEVPVWRAKCKNVAALGREMSITAVQMSELQYDIWVQGMMRDMARSQADRLAAIQPADLTNYLEMATQMDMRTTRMLLGLLNILRIQNAALRYEYLLMPTELTTWPLGMDTVGDLLIAQENAALIGLMQLGPSSDFTSRHVVKDIPVNLLLDGEDWEFEIPVQAGMSSFPSSWSRVRIRHLEMHFVKEASGIGGEIIHQPTTQTGTVYILLQGSTIFHDRRRDQVLPFQAAAPLNYHYAYRLDTGDSTLTNEPSEQFANKFMQMTPFTRWRLRLSASAKENAGLAFPTATALDSTTQIVITFHVTAIRQIDWRHDEE

SEQ ID NO: 249 - protein, 867 aa, synthetic construct
  REGION 1..867: note = PtIP-83 polypeptide variant
MALVDYGKLFEDLNQISMGVLDRIEFSEVMVIHRMYVRLADLNVGQLEGAEKVKQLYIFSDIIELPVVEWRWPPQIPGSVTVIILCRLLQWPTDGRQSDTELHLTFMKLHAIQREENRWEITAADGMNWGVYIHAEEVQVGVLTMSWSSVLRVSALRSVITSGFRAVSVFEVPGSVRSTLGATLRPDHALYSTTMQATPNASHISAFNLRIVSPSAYRVCPLQNDTDTYLGIPADVAAVLPVDVVTDPNILLGMQTTVHIAELVKACHPSPDVVSAVGEHLNWLNKLLLPLKESTQLQGSESYKECLALLGRVHAAMKMVRIGLVVPQLQYRMYGSLINQMAQVAQNYDREFKQFKLFIIQNQILGSYLLQQNRAFAERELQMESFHAAVISQRREELDNTFAKMDRLSGQMEAESSAMEQAKKEMDEGLRQFQNRQVANALFAVLSAVAQIGLAFLTAGATAPGAVASAGQAVSIAGQAAQGLRRVVEILEQLEAVMEVVAAVKDLVDSLEQVGQIVDAPVMPELPSEADWSIFVNEVEAVAEGMPTEVSEVPVWRAKCKNVAALGREMSITAVQMSELQYDIWVQGMMRDMARSQADRLAAIQPADLTNYLEMATQMDMRTTRMLLGLLNILRIQNAALRYEYLLMPTELTTWPLGMDTVGDLLIAQENAALIGLMQLGPSSDFTSRHVVKDIPVNLLLDGEDWEFEIPVQAGMSSFPSSWSRVRIRHLEMHFVKEASGIGGEIIHQPTTQTGTVYILLQGSTIFHDRRRDQVLPFQAAAPLNYHYAYRLDTGDSTLTNEPSEQFANKFMQMTPFTRWRLRLSASAKENAGLAFPTATALDSTTQIVITFHVTAIRQIDWRHDEE

SEQ ID NO: 250 - protein, 867 aa, synthetic construct
  REGION 1..867: note = PtIP-83 polypeptide variant
MALVDYGKLFEDLNQISMGVLDRVEFSEVMVIHRMYVRLADLNVGQLEGAEKVKQLYVFCDILELPVVEWRWPPQIPGSVTVIILCRLLQWPTDGRQSDTELHLTFMKLHAIQREENRWEITAADGMNWGVYIHAEEVQVGVLTMSWSSVLRVSALRSVITSGFRAVSVFEVPGSVRSTLGATLRPDHALYSTTMQATPNASHISAFNLRIVSPSAYRVCPLQNDTDTYLGIPADVAAVLPVDVVTDPNILLGMQTTVHIAELVKACHPSPDVVSAVGEHLNWLNKLLLPLKESTQLQGSESYKECLALLGRVHAAMKMVRIGLVVPQLQYRMYGSLINQMAQVAQNYDREFKQFKLFIIQNQILGSYLLQQNRAFAERELQMESFHAAVISQRREELDNTFAKMDRLSGQMEAESSAMEQAKKEMDEGLRQFQNRQVANALFAVLSAVAQIGLAFLTAGATAPGAVASAGQAVSIAGQAAQGLRRVVEILEQLEAVMEVVAAVKDLVDSLEQVGQIVDAPVMPELPSEADWSIFVNEVEAVAEGMPTEVSEVPVWRAKCKNVAALGREMSITAVQMSELQYDIWVQGMMRDMARSQADRLAAIQPADLTNYLEMATQMDMRTTRMLLGLLNILRIQNAALRYEYLLMPTELTTWPLGMDTVGDLLIAQENAALIGLMQLGPSSDFTSRHVVKDIPVNLLLDGEDWEFEIPVQAGMSSFPSSWSRVRIRHLEMHFVKEASGIGGEIIHQPTTQTGTVYILLQGSTIFHDRRRDQVLPFQAAAPLNYHYAYRLDTGDSTLTNEPSEQFANKFMQMTPFTRWRLRLSASAKENAGLAFPTATALDSTTQIVITFHVTAIRQIDWRHDEE

SEQ ID NO: 251 - protein, 867 aa, synthetic construct
  REGION 1..867: note = PtIP-83 polypeptide variant
MALVDYGKLFEDLNQISMGVLDRVEFSEVMVIHRMYVRLADLNVGQLEGAEKVKQLYVFSDILELPVVEWRWPPQIPGSVTVIILCRLLQWPTDGRQSDTELHLTFMKLHAIQREENRWEITAADGMNWGVYIHAEEVQVGVLTMSWSSVLRVSALRSVITSGFRAVSVFEVPGSVRSTLGATLRPDHALYSTTMQATPNASHISAFNLRIVSPSAYRVCPLQNDTDTYLGIPADVAAVLPVDVVTDPNILLGMQTTVHIAELVKACHPSPDVVSAVGEHLNWLNKLLLPLKESTQLQGSESYKECLALLGRVHAAMKMVRIGLVVPQLQYRMYGSLINQMAQVAQNYDREFKQFKLFIIQNQILGSYLLQQNRAFAERELQMESFHAAVISQRREELDNTFAKMDRLSGQMEAESSAMEQAKKEMDEGLRQFQNRQVANALFAVLSAVAQIGLAFLTAGATAPGAVASAGQAVSIAGQAAQGLRRVVEILEQLEAVMEVVAAVKDLVDSLEQVGQIVDAPVMPELPSEADWSIFVNEVEAVAEGMPTEVSEVPVWRAKCKNVAALGREMSITAVQMSELQYDIWVQGMMRDMARSQADRLAAIQPADLTNYLEMATQMDMRTTRMLLGLLNILRIQNAALRYEYLLMPTELTTWPLGMDTVGDLLIAQENAALIGLMQLGPSSDFTSRHVVKDIPVNLLLDGEDWEFEIPVQAGMSSFPSSWSRVRIRHLEMHFVKEASGIGGEIIHQPTTQTGTVYILLQGSTIFHDRRRDQVLPFQAAAPLNYHYAYRLDTGDSTLTNEPSEQFANKFMQMTPFTRWRLRLSASAKENAGLAFPTATALDSTTQIVITFHVTAIRQIDWRHDEE

SEQ ID NO: 252 - protein, 867 aa, synthetic construct
  REGION 1..867: note = PtIP-83 polypeptide variant
MALVDYGKLFEDLNQISMGVLDRVEFSEVMVIHRMYVRLADLNVGQLEGAEKVKQLYVFSDVLVLPVVEWRWPPQIPGSVTVIILCRLLQWPTDGRQSDTELHLTFMKLHAIQREENRWEITAADGMNWGVYIHAEEVQVGVLTMSWSSVLRVSALRSVITSGFRAVSVFEVPGSVRSTLGATLRPDHALYSTTMQATPNASHISAFNLRIVSPSAYRVCPLQNDTDTYLGIPADVAAVLPVDVVTDPNILLGMQTTVHIAELVKACHPSPDVVSAVGEHLNWLNKLLLPLKESTQLQGSESYKECLALLGRVHAAMKMVRIGLVVPQLQYRMYGSLINQMAQVAQNYDREFKQFKLFIIQNQILGSYLLQQNRAFAERELQMESFHAAVISQRREELDNTFAKMDRLSGQMEAESSAMEQAKKEMDEGLRQFQNRQVANALFAVLSAVAQIGLAFLTAGATAPGAVASAGQAVSIAGQAAQGLRRVVEILEQLEAVMEVVAAVKDLVDSLEQVGQIVDAPVMPELPSEADWSIFVNEVEAVAEGMPTEVSEVPVWRAKCKNVAALGREMSITAVQMSELQYDIWVQGMMRDMARSQADRLAAIQPADLTNYLEMATQMDMRTTRMLLGLLNILRIQNAALRYEYLLMPTELTTWPLGMDTVGDLLIAQENAALIGLMQLGPSSDFTSRHVVKDIPVNLLLDGEDWEFEIPVQAGMSSFPSSWSRVRIRHLEMHFVKEASGIGGEIIHQPTTQTGTVYILLQGSTIFHDRRRDQVLPFQAAAPLNYHYAYRLDTGDSTLTNEPSEQFANKFMQMTPFTRWRLRLSASAKENAGLAFPTATALDSTTQIVITFHVTAIRQIDWRHDEE

SEQ ID NO: 253 - protein, 867 aa, synthetic construct
  REGION 1..867: note = PtIP-83 polypeptide variant
MALVDYGKLFEDLNQISMGVLDRVEFSEVMVIHRMYVRLADLNVGQLEGAEKVKRFYIFADIVELPVVEWRWPPQIPGSVTVIILCRLLQWPTDGRQSDTELHLTFMKLHAIQREENRWEITAADGMNWGVYIHAEEVQVGVLTMSWSSVLRVSALRSVITSGFRAVSVFEVPGSVRSTLGATLRPDHALYSTTMQATPNASHISAFNLRIVSPSAYRVCPLQNDTDTYLGIPADVAAVLPVDVVTDPNILLGMQTTVHIAELVKACHPSPDVVSAVGEHLNWLNKLLLPLKESTQLQGSESYKECLALLGRVHAAMKMVRIGLVVPQLQYRMYGSLINQMAQVAQNYDREFKQFKLFIIQNQILGSYLLQQNRAFAERELQMESFHAAVISQRREELDNTFAKMDRLSGQMEAESSAMEQAKKEMDEGLRQFQNRQVANALFAVLSAVAQIGLAFLTAGATAPGAVASAGQAVSIAGQAAQGLRRVVEILEQLEAVMEVVAAVKDLVDSLEQVGQIVDAPVMPELPSEADWSIFVNEVEAVAEGMPTEVSEVPVWRAKCKNVAALGREMSITAVQMSELQYDIWVQGMMRDMARSQADRLAAIQPADLTNYLEMATQMDMRTTRMLLGLLNILRIQNAALRYEYLLMPTELTTWPLGMDTVGDLLIAQENAALIGLMQLGPSSDFTSRHVVKDIPVNLLLDGEDWEFEIPVQAGMSSFPSSWSRVRIRHLEMHFVKEASGIGGEIIHQPTTQTGTVYILLQGSTIFHDRRRDQVLPFQAAAPLNYHYAYRLDTGDSTLTNEPSEQFANKFMQMTPFTRWRLRLSASAKENAGLAFPTATALDSTTQIVITFHVTAIRQIDWRHDEE

SEQ ID NO: 254 - protein, 867 aa, synthetic construct
  REGION 1..867: note = PtIP-83 polypeptide variant
MALVDYGKLFEDLNQISMGVLDRVEFSEVMVIHRMYVRLADLNVGQLEGAEKVKRFYIFSDIIELPVVEWRWPPQIPGSVTVIILCRLLQWPTDGRQSDTELHLTFMKLHAIQREENRWEITAADGMNWGVYIHAEEVQVGVLTMSWSSVLRVSALRSVITSGFRAVSVFEVPGSVRSTLGATLRPDHALYSTTMQATPNASHISAFNLRIVSPSAYRVCPLQNDTDTYLGIPADVAAVLPVDVVTDPNILLGMQTTVHIAELVKACHPSPDVVSAVGEHLNWLNKLLLPLKESTQLQGSESYKECLALLGRVHAAMKMVRIGLVVPQLQYRMYGSLINQMAQVAQNYDREFKQFKLFIIQNQILGSYLLQQNRAFAERELQMESFHAAVISQRREELDNTFAKMDRLSGQMEAESSAMEQAKKEMDEGLRQFQNRQVANALFAVLSAVAQIGLAFLTAGATAPGAVASAGQAVSIAGQAAQGLRRVVEILEQLEAVMEVVAAVKDLVDSLEQVGQIVDAPVMPELPSEADWSIFVNEVEAVAEGMPTEVSEVPVWRAKCKNVAALGREMSITAVQMSELQYDIWVQGMMRDMARSQADRLAAIQPADLTNYLEMATQMDMRTTRMLLGLLNILRIQNAALRYEYLLMPTELTTWPLGMDTVGDLLIAQENAALIGLMQLGPSSDFTSRHVVKDIPVNLLLDGEDWEFEIPVQAGMSSFPSSWSRVRIRHLEMHFVKEASGIGGEIIHQPTTQTGTVYILLQGSTIFHDRRRDQVLPFQAAAPLNYHYAYRLDTGDSTLTNEPSEQFANKFMQMTPFTRWRLRLSASAKENAGLAFPTATALDSTTQIVITFHVTAIRQIDWRHDEE

SEQ ID NO: 255 - protein, 867 aa, synthetic construct
  REGION 1..867: note = PtIP-83 polypeptide variant
MALVDYGKLFEDLNQISMGVLDRVEFSEVMVIHRMYVRLADLNVGQLEGAEKVKRFYVFSDIVELPVVEWRWPPQIPGSVTVIILCRLLQWPTDGRQSDTELHLTFMKLHAIQREENRWEITAADGMNWGVYIHAEEVQVGVLTMSWSSVLRVSALRSVITSGFRAVSVFEVPGSVRSTLGATLRPDHALYSTTMQATPNASHISAFNLRIVSPSAYRVCPLQNDTDTYLGIPADVAAVLPVDVVTDPNILLGMQTTVHIAELVKACHPSPDVVSAVGEHLNWLNKLLLPLKESTQLQGSESYKECLALLGRVHAAMKMVRIGLVVPQLQYRMYGSLINQMAQVAQNYDREFKQFKLFIIQNQILGSYLLQQNRAFAERELQMESFHAAVISQRREELDNTFAKMDRLSGQMEAESSAMEQAKKEMDEGLRQFQNRQVANALFAVLSAVAQIGLAFLTAGATAPGAVASAGQAVSIAGQAAQGLRRVVEILEQLEAVMEVVAAVKDLVDSLEQVGQIVDAPVMPELPSEADWSIFVNEVEAVAEGMPTEVSEVPVWRAKCKNVAALGREMSITAVQMSELQYDIWVQGMMRDMARSQADRLAAIQPADLTNYLEMATQMDMRTTRMLLGLLNILRIQNAALRYEYLLMPTELTTWPLGMDTVGDLLIAQENAALIGLMQLGPSSDFTSRHVVKDIPVNLLLDGEDWEFEIPVQAGMSSFPSSWSRVRIRHLEMHFVKEASGIGGEIIHQPTTQTGTVYILLQGSTIFHDRRRDQVLPFQAAAPLNYHYAYRLDTGDSTLTNEPSEQFANKFMQMTPFTRWRLRLSASAKENAGLAFPTATALDSTTQIVITFHVTAIRQIDWRHDEE

SEQ ID NO: 256 - protein, 867 aa, synthetic construct
  REGION 1..867: note = PtIP-83 polypeptide variant
MALVDYGKLFEDLNQISMGVLDRVEFSEVMVIHRMYVRLADLNVGQLEGAEKVKRLVILGDIIVVPVVEWRWPPQIPGSVTVIILCRLLQWPTDGRQSDTELHLTFMKLHAIQREENRWEITAADGMNWGVYIHAEEVQVGVLTMSWSSVLRVSALRSVITSGFRAVSVFEVPGSVRSTLGATLRPDHALYSTTMQATPNASHISAFNLRIVSPSAYRVCPLQNDTDTYLGIPADVAAVLPVDVVTDPNILLGMQTTVHIAELVKACHPSPDVVSAVGEHLNWLNKLLLPLKESTQLQGSESYKECLALLGRVHAAMKMVRIGLVVPQLQYRMYGSLINQMAQVAQNYDREFKQFKLFIIQNQILGSYLLQQNRAFAERELQMESFHAAVISQRREELDNTFAKMDRLSGQMEAESSAMEQAKKEMDEGLRQFQNRQVANALFAVLSAVAQIGLAFLTAGATAPGAVASAGQAVSIAGQAAQGLRRVVEILEQLEAVMEVVAAVKDLVDSLEQVGQIVDAPVMPELPSEADWSIFVNEVEAVAEGMPTEVSEVPVWRAKCKNVAALGREMSITAVQMSELQYDIWVQGMMRDMARSQADRLAAIQPADLTNYLEMATQMDMRTTRMLLGLLNILRIQNAALRYEYLLMPTELTTWPLGMDTVGDLLIAQENAALIGLMQLGPSSDFTSRHVVKDIPVNLLLDGEDWEFEIPVQAGMSSFPSSWSRVRIRHLEMHFVKEASGIGGEIIHQPTTQTGTVYILLQGSTIFHDRRRDQVLPFQAAAPLNYHYAYRLDTGDSTLTNEPSEQFANKFMQMTPFTRWRLRLSASAKENAGLAFPTATALDSTTQIVITFHVTAIRQIDWRHDEE

SEQ ID NO: 257 - protein, 867 aa, synthetic construct
  REGION 1..867: note = PtIP-83 polypeptide variant
MALVDYGKLFEDLNQISMGVLDRVEFSEVMVIHRMYVRLADLNVGQLEGAEKVKRLYIFADIIELPVVEWRWPPQIPGSVTVIILCRLLQWPTDGRQSDTELHLTFMKLHAIQREENRWEITAADGMNWGVYIHAEEVQVGVLTMSWSSVLRVSALRSVITSGFRAVSVFEVPGSVRSTLGATLRPDHALYSTTMQATPNASHISAFNLRIVSPSAYRVCPLQNDTDTYLGIPADVAAVLPVDVVTDPNILLGMQTTVHIAELVKACHPSPDVVSAVGEHLNWLNKLLLPLKESTQLQGSESYKECLALLGRVHAAMKMVRIGLVVPQLQYRMYGSLINQMAQVAQNYDREFKQFKLFIIQNQILGSYLLQQNRAFAERELQMESFHAAVISQRREELDNTFAKMDRLSGQMEAESSAMEQAKKEMDEGLRQFQNRQVANALFAVLSAVAQIGLAFLTAGATAPGAVASAGQAVSIAGQAAQGLRRVVEILEQLEAVMEVVAAVKDLVDSLEQVGQIVDAPVMPELPSEADWSIFVNEVEAVAEGMPTEVSEVPVWRAKCKNVAALGREMSITAVQMSELQYDIWVQGMMRDMARSQADRLAAIQPADLTNYLEMATQMDMRTTRMLLGLLNILRIQNAALRYEYLLMPTELTTWPLGMDTVGDLLIAQENAALIGLMQLGPSSDFTSRHVVKDIPVNLLLDGEDWEFEIPVQAGMSSFPSSWSRVRIRHLEMHFVKEASGIGGEIIHQPTTQTGTVYILLQGSTIFHDRRRDQVLPFQAAAPLNYHYAYRLDTGDSTLTNEPSEQFANKFMQMTPFTRWRLRLSASAKENAGLAFPTATALDSTTQIVITFHVTAIRQIDWRHDEE

SEQ ID NO: 258 - protein, 867 aa, synthetic construct
  REGION 1..867: note = PtIP-83 polypeptide variant
MALVDYGKLFEDLNQISMGVLDRVEFSEVMVIHRMYVRLADLNVGQLEGAEKVKRLYIFCDIIVLPVVEWRWPPQIPGSVTVIILCRLLQWPTDGRQSDTELHLTFMKLHAIQREENRWEITAADGMNWGVYIHAEEVQVGVLTMSWSSVLRVSALRSVITSGFRAVSVFEVPGSVRSTLGATLRPDHALYSTTMQATPNASHISAFNLRIVSPSAYRVCPLQNDTDTYLGIPADVAAVLPVDVVTDPNILLGMQTTVHIAELVKACHPSPDVVSAVGEHLNWLNKLLLPLKESTQLQGSESYKECLALLGRVHAAMKMVRIGLVVPQLQYRMYGSLINQMAQVAQNYDREFKQFKLFIIQNQILGSYLLQQNRAFAERELQMESFHAAVISQRREELDNTFAKMDRLSGQMEAESSAMEQAKKEMDEGLRQFQNRQVANALFAVLSAVAQIGLAFLTAGATAPGAVASAGQAVSIAGQAAQGLRRVVEILEQLEAVMEVVAAVKDLVDSLEQVGQIVDAPVMPELPSEADWSIFVNEVEAVAEGMPTEVSEVPVWRAKCKNVAALGREMSITAVQMSELQYDIWVQGMMRDMARSQADRLAAIQPADLTNYLEMATQMDMRTTRMLLGLLNILRIQNAALRYEYLLMPTELTTWPLGMDTVGDLLIAQENAALIGLMQLGPSSDFTSRHVVKDIPVNLLLDGEDWEFEIPVQAGMSSFPSSWSRVRIRHLEMHFVKEASGIGGEIIHQPTTQTGTVYILLQGSTIFHDRRRDQVLPFQAAAPLNYHYAYRLDTGDSTLTNEPSEQFANKFMQMTPFTRWRLRLSASAKENAGLAFPTATALDSTTQIVITFHVTAIRQIDWRHDEE

SEQ ID NO: 259 - protein, 867 aa, synthetic construct
  REGION 1..867: note = PtIP-83 polypeptide variant
MALVDYGKLFEDLNQISMGVLDRVEFSEVMVIHRMYVRLADLNVGQLEGAEKVKRLYIFCDIVELPVVEWRWPPQIPGSVTVIILCRLLQWPTDGRQSDTELHLTFMKLHAIQREENRWEITAADGMNWGVYIHAEEVQVGVLTMSWSSVLRVSALRSVITSGFRAVSVFEVPGSVRSTLGATLRPDHALYSTTMQATPNASHISAFNLRIVSPSAYRVCPLQNDTDTYLGIPADVAAVLPVDVVTDPNILLGMQTTVHIAELVKACHPSPDVVSAVGEHLNWLNKLLLPLKESTQLQGSESYKECLALLGRVHAAMKMVRIGLVVPQLQYRMYGSLINQMAQVAQNYDREFKQFKLFIIQNQILGSYLLQQNRAFAERELQMESFHAAVISQRREELDNTFAKMDRLSGQMEAESSAMEQAKKEMDEGLRQFQNRQVANALFAVLSAVAQIGLAFLTAGATAPGAVASAGQAVSIAGQAAQGLRRVVEILEQLEAVMEVVAAVKDLVDSLEQVGQIVDAPVMPELPSEADWSIFVNEVEAVAEGMPTEVSEVPVWRAKCKNVAALGREMSITAVQMSELQYDIWVQGMMRDMARSQADRLAAIQPADLTNYLEMATQMDMRTTRMLLGLLNILRIQNAALRYEYLLMPTELTTWPLGMDTVGDLLIAQENAALIGLMQLGPSSDFTSRHVVKDIPVNLLLDGEDWEFEIPVQAGMSSFPSSWSRVRIRHLEMHFVKEASGIGGEIIHQPTTQTGTVYILLQGSTIFHDRRRDQVLPFQAAAPLNYHYAYRLDTGDSTLTNEPSEQFANKFMQMTPFTRWRLRLSASAKENAGLAFPTATALDSTTQIVITFHVTAIRQIDWRHDEE

SEQ ID NO: 260 - protein, 867 aa, synthetic construct
  REGION 1..867: note = PtIP-83 polypeptide variant
MALVDYGKLFEDLNQISMGVLDRVEFSEVMVIHRMYVRLADLNVGQLEGAEKVKRLYIFGDIIELPVVEWRWPAQIPGSVTVIILCRLLQWPTDGRQSDTELHLTFMKLHAIQREENRWEITAADGMNWGVYIHAEEVQVGVLTMSWSSVLRVSALRSVITSGFRAVSVFEVPGSVRSTLGATLRPDHALYSTTMQATPNASHISAFNLRIVSPSAYRVCPLQNDTDTYLGIPADVAAVLPVDVVTDPNILLGMQTTVHIAELVKACHPSPDVVSAVGEHLNWLNKLLLPLKESTQLQGSESYKECLALLGRVHAAMKMVRIGLVVPQLQYRMYGSLINQMAQVAQNYDREFKQFKLFIIQNQILGSYLLQQNRAFAERELQMESFHAAVISQRREELDNTFAKMDRLSGQMEAESSAMEQAKKEMDEGLRQFQNRQVANALFAVLSAVAQIGLAFLTAGATAPGAVASAGQAVSIAGQAAQGLRRVVEILEQLEAVMEVVAAVKDLVDSLEQVGQIVDAPVMPELPSEADWSIFVNEVEAVAEGMPTEVSEVPVWRAKCKNVAALGREMSITAVQMSELQYDIWVQGMMRDMARSQADRLAAIQPADLTNYLEMATQMDMRTTRMLLGLLNILRIQNAALRYEYLLMPTELTTWPLGMDTVGDLLIAQENAALIGLMQLGPSSDFTSRHVVKDIPVNLLLDGEDWEFEIPVQAGMSSFPSSWSRVRIRHLEMHFVKEASGIGGEIIHQPTTQTGTVYILLQGSTIFHDRRRDQVLPFQAAAPLNYHYAYRLDTGDSTLTNEPSEQFANKFMQMTPFTRWRLRLSASAKENAGLAFPTATALDSTTQIVITFHVTAIRQIDWRHDEE

SEQ ID NO: 261 - protein, 867 aa, synthetic construct
  REGION 1..867: note = PtIP-83 polypeptide variant
MALVDYGKLFEDLNQISMGVLDRVEFSEVMVIHRMYVRLADLNVGQLEGAEKVKRLYIFGDVIELPVVEWRWPPQIPGSVTVIILCRLLQWPTDGRQSDTELHLTFMKLHAIQREENRWEITAADGMNWGVYIHAEEVQVGVLTMSWSSVLRVSALRSVITSGFRAVSVFEVPGSVRSTLGATLRPDHALYSTTMQATPNASHISAFNLRIVSPSAYRVCPLQNDTDTYLGIPADVAAVLPVDVVTDPNILLGMQTTVHIAELVKACHPSPDVVSAVGEHLNWLNKLLLPLKESTQLQGSESYKECLALLGRVHAAMKMVRIGLVVPQLQYRMYGSLINQMAQVAQNYDREFKQFKLFIIQNQILGSYLLQQNRAFAERELQMESFHAAVISQRREELDNTFAKMDRLSGQMEAESSAMEQAKKEMDEGLRQFQNRQVANALFAVLSAVAQIGLAFLTAGATAPGAVASAGQAVSIAGQAAQGLRRVVEILEQLEAVMEVVAAVKDLVDSLEQVGQIVDAPVMPELPSEADWSIFVNEVEAVAEGMPTEVSEVPVWRAKCKNVAALGREMSITAVQMSELQYDIWVQGMMRDMARSQADRLAAIQPADLTNYLEMATQMDMRTTRMLLGLLNILRIQNAALRYEYLLMPTELTTWPLGMDTVGDLLIAQENAALIGLMQLGPSSDFTSRHVVKDIPVNLLLDGEDWEFEIPVQAGMSSFPSSWSRVRIRHLEMHFVKEASGIGGEIIHQPTTQTGTVYILLQGSTIFHDRRRDQVLPFQAAAPLNYHYAYRLDTGDSTLTNEPSEQFANKFMQMTPFTRWRLRLSASAKENAGLAFPTATALDSTTQIVITFHVTAIRQIDWRHDEE

SEQ ID NO: 262 - protein, 867 aa, synthetic construct
  REGION 1..867: note = PtIP-83 polypeptide variant
MALVDYGKLFEDLNQISMGVLDRVEFSEVMVIHRMYVRLADLNVGQLEGAEKVKRLYIFSDIIVLPVVEWRWPPQIPGSVTVIILCRLLQWPTDGRQSDTELHLTFMKLHAIQREENRWEITAADGMNWGVYIHAEEVQVGVLTMSWSSVLRVSALRSVITSGFRAVSVFEVPGSVRSTLGATLRPDHALYSTTMQATPNASHISAFNLRIVSPSAYRVCPLQNDTDTYLGIPADVAAVLPVDVVTDPNILLGMQTTVHIAELVKACHPSPDVVSAVGEHLNWLNKLLLPLKESTQLQGSESYKECLALLGRVHAAMKMVRIGLVVPQLQYRMYGSLINQMAQVAQNYDREFKQFKLFIIQNQILGSYLLQQNRAFAERELQMESFHAAVISQRREELDNTFAKMDRLSGQMEAESSAMEQAKKEMDEGLRQFQNRQVANALFAVLSAVAQIGLAFLTAGATAPGAVASAGQAVSIAGQAAQGLRRVVEILEQLEAVMEVVAAVKDLVDSLEQVGQIVDAPVMPELPSEADWSIFVNEVEAVAEGMPTEVSEVPVWRAKCKNVAALGREMSITAVQMSELQYDIWVQGMMRDMARSQADRLAAIQPADLTNYLEMATQMDMRTTRMLLGLLNILRIQNAALRYEYLLMPTELTTWPLGMDTVGDLLIAQENAALIGLMQLGPSSDFTSRHVVKDIPVNLLLDGEDWEFEIPVQAGMSSFPSSWSRVRIRHLEMHFVKEASGIGGEIIHQPTTQTGTVYILLQGSTIFHDRRRDQVLPFQAAAPLNYHYAYRLDTGDSTLTNEPSEQFANKFMQMTPFTRWRLRLSASAKENAGLAFPTATALDSTTQIVITFHVTAIRQIDWRHDEE

SEQ ID NO: 263 - protein, 867 aa, synthetic construct
  REGION 1..867: note = PtIP-83 polypeptide variant
MALVDYGKLFEDLNQISMGVLDRVEFSEVMVIHRMYVRLADLNVGQLEGAEKVKRLYIFSDILELPVVEWRWPPQIPGSVTVIILCRLLQWPTDGRQSDTELHLTFMKLHAIQREENRWEITAADGMNWGVYIHAEEVQVGVLTMSWSSVLRVSALRSVITSGFRAVSVFEVPGSVRSTLGATLRPDHALYSTTMQATPNASHISAFNLRIVSPSAYRVCPLQNDTDTYLGIPADVAAVLPVDVVTDPNILLGMQTTVHIAELVKACHPSPDVVSAVGEHLNWLNKLLLPLKESTQLQGSESYKECLALLGRVHAAMKMVRIGLVVPQLQYRMYGSLINQMAQVAQNYDREFKQFKLFIIQNQILGSYLLQQNRAFAERELQMESFHAAVISQRREELDNTFAKMDRLSGQMEAESSAMEQAKKEMDEGLRQFQNRQVANALFAVLSAVAQIGLAFLTAGATAPGAVASAGQAVSIAGQAAQGLRRVVEILEQLEAVMEVVAAVKDLVDSLEQVGQIVDAPVMPELPSEADWSIFVNEVEAVAEGMPTEVSEVPVWRAKCKNVAALGREMSITAVQMSELQYDIWVQGMMRDMARSQADRLAAIQPADLTNYLEMATQMDMRTTRMLLGLLNILRIQNAALRYEYLLMPTELTTWPLGMDTVGDLLIAQENAALIGLMQLGPSSDFTSRHVVKDIPVNLLLDGEDWEFEIPVQAGMSSFPSSWSRVRIRHLEMHFVKEASGIGGEIIHQPTTQTGTVYILLQGSTIFHDRRRDQVLPFQAAAPLNYHYAYRLDTGDSTLTNEPSEQFANKFMQMTPFTRWRLRLSASAKENAGLAFPTATALDSTTQIVITFHVTAIRQIDWRHDEE

SEQ ID NO: 264 - protein, 867 aa, synthetic construct
  REGION 1..867: note = PtIP-83 polypeptide variant
MALVDYGKLFEDLNQISMGVLDRVEFSEVMVIHRMYVRLADLNVGQLEGAEKVKRLYIFSDVIVLPVVEWRWPPQIPGSVTVIILCRLLQWPTDGRQSDTELHLTFMKLHAIQREENRWEITAADGMNWGVYIHAEEVQVGVLTMSWSSVLRVSALRSVITSGFRAVSVFEVPGSVRSTLGATLRPDHALYSTTMQATPNASHISAFNLRIVSPSAYRVCPLQNDTDTYLGIPADVAAVLPVDVVTDPNILLGMQTTVHIAELVKACHPSPDVVSAVGEHLNWLNKLLLPLKESTQLQGSESYKECLALLGRVHAAMKMVRIGLVVPQLQYRMYGSLINQMAQVAQNYDREFKQFKLFIIQNQILGSYLLQQNRAFAERELQMESFHAAVISQRREELDNTFAKMDRLSGQMEAESSAMEQAKKEMDEGLRQFQNRQVANALFAVLSAVAQIGLAFLTAGATAPGAVASAGQAVSIAGQAAQGLRRVVEILEQLEAVMEVVAAVKDLVDSLEQVGQIVDAPVMPELPSEADWSIFVNEVEAVAEGMPTEVSEVPVWRAKCKNVAALGREMSITAVQMSELQYDIWVQGMMRDMARSQADRLAAIQPADLTNYLEMATQMDMRTTRMLLGLLNILRIQNAALRYEYLLMPTELTTWPLGMDTVGDLLIAQENAALIGLMQLGPSSDFTSRHVVKDIPVNLLLDGEDWEFEIPVQAGMSSFPSSWSRVRIRHLEMHFVKEASGIGGEIIHQPTTQTGTVYILLQGSTIFHDRRRDQVLPFQAAAPLNYHYAYRLDTGDSTLTNEPSEQFANKFMQMTPFTRWRLRLSASAKENAGLAFPTATALDSTTQIVITFHVTAIRQIDWRHDEE

SEQ ID NO: 265 - protein, 867 aa, synthetic construct
  REGION 1..867: note = PtIP-83 polypeptide variant
MALVDYGKLFEDLNQISMGVLDRVEFSEVMVIHRMYVRLADLNVGQLEGAEKVKRLYIFTDVIELPVVEWRWPPQIPGSVTVIILCRLLQWPTDGRQSDTELHLTFMKLHAIQREENRWEITAADGMNWGVYIHAEEVQVGVLTMSWSSVLRVSALRSVITSGFRAVSVFEVPGSVRSTLGATLRPDHALYSTTMQATPNASHISAFNLRIVSPSAYRVCPLQNDTDTYLGIPADVAAVLPVDVVTDPNILLGMQTTVHIAELVKACHPSPDVVSAVGEHLNWLNKLLLPLKESTQLQGSESYKECLALLGRVHAAMKMVRIGLVVPQLQYRMYGSLINQMAQVAQNYDREFKQFKLFIIQNQILGSYLLQQNRAFAERELQMESFHAAVISQRREELDNTFAKMDRLSGQMEAESSAMEQAKKEMDEGLRQFQNRQVANALFAVLSAVAQIGLAFLTAGATAPGAVASAGQAVSIAGQAAQGLRRVVEILEQLEAVMEVVAAVKDLVDSLEQVGQIVDAPVMPELPSEADWSIFVNEVEAVAEGMPTEVSEVPVWRAKCKNVAALGREMSITAVQMSELQYDIWVQGMMRDMARSQADRLAAIQPADLTNYLEMATQMDMRTTRMLLGLLNILRIQNAALRYEYLLMPTELTTWPLGMDTVGDLLIAQENAALIGLMQLGPSSDFTSRHVVKDIPVNLLLDGEDWEFEIPVQAGMSSFPSSWSRVRIRHLEMHFVKEASGIGGEIIHQPTTQTGTVYILLQGSTIFHDRRRDQVLPFQAAAPLNYHYAYRLDTGDSTLTNEPSEQFANKFMQMTPFTRWRLRLSASAKENAGLAFPTATALDSTTQIVITFHVTAIRQIDWRHDEE

SEQ ID NO: 266 - protein, 867 aa, synthetic construct
  REGION 1..867: note = PtIP-83 polypeptide variant
MALVDYGKLFEDLNQISMGVLDRVEFSEVMVIHRMYVRLADLNVGQLEGAEKVKRLYVFCDIIELPVVEWRWPPQIPGSVTVIILCRLLQWPTDGRQSDTELHLTFMKLHAIQREENRWEITAADGMNWGVYIHAEEVQVGVLTMSWSSVLRVSALRSVITSGFRAVSVFEVPGSVRSTLGATLRPDHALYSTTMQATPNASHISAFNLRIVSPSAYRVCPLQNDTDTYLGIPADVAAVLPVDVVTDPNILLGMQTTVHIAELVKACHPSPDVVSAVGEHLNWLNKLLLPLKESTQLQGSESYKECLALLGRVHAAMKMVRIGLVVPQLQYRMYGSLINQMAQVAQNYDREFKQFKLFIIQNQILGSYLLQQNRAFAERELQMESFHAAVISQRREELDNTFAKMDRLSGQMEAESSAMEQAKKEMDEGLRQFQNRQVANALFAVLSAVAQIGLAFLTAGATAPGAVASAGQAVSIAGQAAQGLRRVVEILEQLEAVMEVVAAVKDLVDSLEQVGQIVDAPVMPELPSEADWSIFVNEVEAVAEGMPTEVSEVPVWRAKCKNVAALGREMSITAVQMSELQYDIWVQGMMRDMARSQADRLAAIQPADLTNYLEMATQMDMRTTRMLLGLLNILRIQNAALRYEYLLMPTELTTWPLGMDTVGDLLIAQENAALIGLMQLGPSSDFTSRHVVKDIPVNLLLDGEDWEFEIPVQAGMSSFPSSWSRVRIRHLEMHFVKEASGIGGEIIHQPTTQTGTVYILLQGSTIFHDRRRDQVLPFQAAAPLNYHYAYRLDTGDSTLTNEPSEQFANKFMQMTPFTRWRLRLSASAKENAGLAFPTATALDSTTQIVITFHVTAIRQIDWRHDEE

SEQ ID NO: 267 - protein, 867 aa, synthetic construct
  REGION 1..867: note = PtIP-83 polypeptide variant
MALVDYGKLFEDLNQISMGVLDRVEFSEVMVIHRMYVRLADLNVGQLEGAEKVKRLYVFCDIIVLPVVEWRWPPQIPGSVTVIILCRLLQWPTDGRQSDTELHLTFMKLHAIQREENRWEITAADGMNWGVYIHAEEVQVGVLTMSWSSVLRVSALRSVITSGFRAVSVFEVPGSVRSTLGATLRPDHALYSTTMQATPNASHISAFNLRIVSPSAYRVCPLQNDTDTYLGIPADVAAVLPVDVVTDPNILLGMQTTVHIAELVKACHPSPDVVSAVGEHLNWLNKLLLPLKESTQLQGSESYKECLALLGRVHAAMKMVRIGLVVPQLQYRMYGSLINQMAQVAQNYDREFKQFKLFIIQNQILGSYLLQQNRAFAERELQMESFHAAVISQRREELDNTFAKMDRLSGQMEAESSAMEQAKKEMDEGLRQFQNRQVANALFAVLSAVAQIGLAFLTAGATAPGAVASAGQAVSIAGQAAQGLRRVVEILEQLEAVMEVVAAVKDLVDSLEQVGQIVDAPVMPELPSEADWSIFVNEVEAVAEGMPTEVSEVPVWRAKCKNVAALGREMSITAVQMSELQYDIWVQGMMRDMARSQADRLAAIQPADLTNYLEMATQMDMRTTRMLLGLLNILRIQNAALRYEYLLMPTELTTWPLGMDTVGDLLIAQENAALIGLMQLGPSSDFTSRHVVKDIPVNLLLDGEDWEFEIPVQAGMSSFPSSWSRVRIRHLEMHFVKEASGIGGEIIHQPTTQTGTVYILLQGSTIFHDRRRDQVLPFQAAAPLNYHYAYRLDTGDSTLTNEPSEQFANKFMQMTPFTRWRLRLSASAKENAGLAFPTATALDSTTQIVITFHVTAIRQIDWRHDEE

SEQ ID NO: 268 - protein, 867 aa, synthetic construct
  REGION 1..867: note = PtIP-83 polypeptide variant
MALVDYGKLFEDLNQISMGVLDRVEFSEVMVIHRMYVRLADLNVGQLEGAEKVKRLYVFGDIVELPVVEWRWPPQIPGSVTVIILCRLLQWPTDGRQSDTELHLTFMKLHAIQREENRWEITAADGMNWGVYIHAEEVQVGVLTMSWSSVLRVSALRSVITSGFRAVSVFEVPGSVRSTLGATLRPDHALYSTTMQATPNASHISAFNLRIVSPSAYRVCPLQNDTDTYLGIPADVAAVLPVDVVTDPNILLGMQTTVHIAELVKACHPSPDVVSAVGEHLNWLNKLLLPLKESTQLQGSESYKECLALLGRVHAAMKMVRIGLVVPQLQYRMYGSLINQMAQVAQNYDREFKQFKLFIIQNQILGSYLLQQNRAFAERELQMESFHAAVISQRREELDNTFAKMDRLSGQMEAESSAMEQAKKEMDEGLRQFQNRQVANALFAVLSAVAQIGLAFLTAGATAPGAVASAGQAVSIAGQAAQGLRRVVEILEQLEAVMEVVAAVKDLVDSLEQVGQIVDAPVMPELPSEADWSIFVNEVEAVAEGMPTEVSEVPVWRAKCKNVAALGREMSITAVQMSELQYDIWVQGMMRDMARSQADRLAAIQPADLTNYLEMATQMDMRTTRMLLGLLNILRIQNAALRYEYLLMPTELTTWPLGMDTVGDLLIAQENAALIGLMQLGPSSDFTSRHVVKDIPVNLLLDGEDWEFEIPVQAGMSSFPSSWSRVRIRHLEMHFVKEASGIGGEIIHQPTTQTGTVYILLQGSTIFHDRRRDQVLPFQAAAPLNYHYAYRLDTGDSTLTNEPSEQFANKFMQMTPFTRWRLRLSASAKENAGLAFPTATALDSTTQIVITFHVTAIRQIDWRHDEE

SEQ ID NO: 269 - protein, 867 aa, synthetic construct
  REGION 1..867: note = PtIP-83 polypeptide variant
MALVDYGKLFEDLNQISMGVLDRVEFSEVMVIHRMYVRLADLNVGQLEGAEKVKRLYVFGDVVELPVVEWRWPPQIPGSVTVIILCRLLQWPTDGRQSDTELHLTFMKLHAIQREENRWEITAADGMNWGVYIHAEEVQVGVLTMSWSSVLRVSALRSVITSGFRAVSVFEVPGSVRSTLGATLRPDHALYSTTMQATPNASHISAFNLRIVSPSAYRVCPLQNDTDTYLGIPADVAAVLPVDVVTDPNILLGMQTTVHIAELVKACHPSPDVVSAVGEHLNWLNKLLLPLKESTQLQGSESYKECLALLGRVHAAMKMVRIGLVVPQLQYRMYGSLINQMAQVAQNYDREFKQFKLFIIQNQILGSYLLQQNRAFAERELQMESFHAAVISQRREELDNTFAKMDRLSGQMEAESSAMEQAKKEMDEGLRQFQNRQVANALFAVLSAVAQIGLAFLTAGATAPGAVASAGQAVSIAGQAAQGLRRVVEILEQLEAVMEVVAAVKDLVDSLEQVGQIVDAPVMPELPSEADWSIFVNEVEAVAEGMPTEVSEVPVWRAKCKNVAALGREMSITAVQMSELQYDIWVQGMMRDMARSQADRLAAIQPADLTNYLEMATQMDMRTTRMLLGLLNILRIQNAALRYEYLLMPTELTTWPLGMDTVGDLLIAQENAALIGLMQLGPSSDFTSRHVVKDIPVNLLLDGEDWEFEIPVQAGMSSFPSSWSRVRIRHLEMHFVKEASGIGGEIIHQPTTQTGTVYILLQGSTIFHDRRRDQVLPFQAAAPLNYHYAYRLDTGDSTLTNEPSEQFANKFMQMTPFTRWRLRLSASAKENAGLAFPTATALDSTTQIVITFHVTAIRQIDWRHDEE

SEQ ID NO: 270 - protein, 867 aa, synthetic construct
  REGION 1..867: note = PtIP-83 polypeptide variant
MALVDYGKLFEDLNQISMGVLDRVEFSEVMVIHRMYVRLADLNVGQLEGAEKVKRLYVFSDIIELPVVEWRWPPQIPGSVTVIILCRLLQWPTDGRQSDTELHLTFMKLHAIQREENRWEITAADGMNWGVYIHAEEVQVGVLTMSWSSVLRVSALRSVITSGFRAVSVFEVPGSVRSTLGATLRPDHALYSTTMQATPNASHISAFNLRIVSPSAYRVCPLQNDTDTYLGIPADVAAVLPVDVVTDPNILLGMQTTVHIAELVKACHPSPDVVSAVGEHLNWLNKLLLPLKESTQLQGSESYKECLALLGRVHAAMKMVRIGLVVPQLQYRMYGSLINQMAQVAQNYDREFKQFKLFIIQNQILGSYLLQQNRAFAERELQMESFHAAVISQRREELDNTFAKMDRLSGQMEAESSAMEQAKKEMDEGLRQFQNRQVANALFAVLSAVAQIGLAFLTAGATAPGAVASAGQAVSIAGQAAQGLRRVVEILEQLEAVMEVVAAVKDLVDSLEQVGQIVDAPVMPELPSEADWSIFVNEVEAVAEGMPTEVSEVPVWRAKCKNVAALGREMSITAVQMSELQYDIWVQGMMRDMARSQADRLAAIQPADLTNYLEMATQMDMRTTRMLLGLLNILRIQNAALRYEYLLMPTELTTWPLGMDTVGDLLIAQENAALIGLMQLGPSSDFTSRHVVKDIPVNLLLDGEDWEFEIPVQAGMSSFPSSWSRVRIRHLEMHFVKEASGIGGEIIHQPTTQTGTVYILLQGSTIFHDRRRDQVLPFQAAAPLNYHYAYRLDTGDSTLTNEPSEQFANKFMQMTPFTRWRLRLSASAKENAGLAFPTATALDSTTQIVITFHVTAIRQIDWRHDEE

SEQ ID NO: 271 - protein, 867 aa, synthetic construct
  REGION 1..867: note = PtIP-83 polypeptide variant
MALVDYGKLFEDLNQISMGVLDRVEFSEVMVIHRMYVRLADLNVGQLEGAEKVKRLYVFSDIVELPVVEWRWPPQIPGSVTVIILCRLLQWPTDGRQSDTELHLTFMKLHAIQREENRWEITAADGMNWGVYIHAEEVQVGVLTMSWSSVLRVSALRSVITSGFRAVSVFEVPGSVRSTLGATLRPDHALYSTTMQATPNASHISAFNLRIVSPSAYRVCPLQNDTDTYLGIPADVAAVLPVDVVTDPNILLGMQTTVHIAELVKACHPSPDVVSAVGEHLNWLNKLLLPLKESTQLQGSESYKECLALLGRVHAAMKMVRIGLVVPQLQYRMYGSLINQMAQVAQNYDREFKQFKLFIIQNQILGSYLLQQNRAFAERELQMESFHAAVISQRREELDNTFAKMDRLSGQMEAESSAMEQAKKEMDEGLRQFQNRQVANALFAVLSAVAQIGLAFLTAGATAPGAVASAGQAVSIAGQAAQGLRRVVEILEQLEAVMEVVAAVKDLVDSLEQVGQIVDAPVMPELPSEADWSIFVNEVEAVAEGMPTEVSEVPVWRAKCKNVAALGREMSITAVQMSELQYDIWVQGMMRDMARSQADRLAAIQPADLTNYLEMATQMDMRTTRMLLGLLNILRIQNAALRYEYLLMPTELTTWPLGMDTVGDLLIAQENAALIGLMQLGPSSDFTSRHVVKDIPVNLLLDGEDWEFEIPVQAGMSSFPSSWSRVRIRHLEMHFVKEASGIGGEIIHQPTTQTGTVYILLQGSTIFHDRRRDQVLPFQAAAPLNYHYAYRLDTGDSTLTNEPSEQFANKFMQMTPFTRWRLRLSASAKENAGLAFPTATALDSTTQIVITFHVTAIRQIDWRHDEE

SEQ ID NO: 272 - protein, 867 aa, synthetic construct
  REGION 1..867: note = PtIP-83 polypeptide variant
MALVDYGKLFEDLNQISMGVLDRVEFSEVMVIHRMYVRLADLNVGQLEGAEKVKRLYVFSDVIELPVVEWRWPPQIPGSVTVIILCRLLQWPTDGRQSDTELHLTFMKLHAIQREENRWEITAADGMNWGVYIHAEEVQVGVLTMSWSSVLRVSALRSVITSGFRAVSVFEVPGSVRSTLGATLRPDHALYSTTMQATPNASHISAFNLRIVSPSAYRVCPLQNDTDTYLGIPADVAAVLPVDVVTDPNILLGMQTTVHIAELVKACHPSPDVVSAVGEHLNWLNKLLLPLKESTQLQGSESYKECLALLGRVHAAMKMVRIGLVVPQLQYRMYGSLINQMAQVAQNYDREFKQFKLFIIQNQILGSYLLQQNRAFAERELQMESFHAAVISQRREELDNTFAKMDRLSGQMEAESSAMEQAKKEMDEGLRQFQNRQVANALFAVLSAVAQIGLAFLTAGATAPGAVASAGQAVSIAGQAAQGLRRVVEILEQLEAVMEVVAAVKDLVDSLEQVGQIVDAPVMPELPSEADWSIFVNEVEAVAEGMPTEVSEVPVWRAKCKNVAALGREMSITAVQMSELQYDIWVQGMMRDMARSQADRLAAIQPADLTNYLEMATQMDMRTTRMLLGLLNILRIQNAALRYEYLLMPTELTTWPLGMDTVGDLLIAQENAALIGLMQLGPSSDFTSRHVVKDIPVNLLLDGEDWEFEIPVQAGMSSFPSSWSRVRIRHLEMHFVKEASGIGGEIIHQPTTQTGTVYILLQGSTIFHDRRRDQVLPFQAAAPLNYHYAYRLDTGDSTLTNEPSEQFANKFMQMTPFTRWRLRLSASAKENAGLAFPTATALDSTTQIVITFHVTAIRQIDWRHDEE

SEQ ID NO: 273 - protein, 867 aa, synthetic construct
  REGION 1..867: note = PtIP-83 polypeptide variant
MALVDYGKLFEDLNQISMGVLDRVEFSEVMVIHRMYVRLADLNVGQLEGAEKVKRLYVFTDVIVLPVVEWRWPPQIPGSVTVIILCRLLQWPTDGRQSDTELHLTFMKLHAIQREENRWEITAADGMNWGVYIHAEEVQVGVLTMSWSSVLRVSALRSVITSGFRAVSVFEVPGSVRSTLGATLRPDHALYSTTMQATPNASHISAFNLRIVSPSAYRVCPLQNDTDTYLGIPADVAAVLPVDVVTDPNILLGMQTTVHIAELVKACHPSPDVVSAVGEHLNWLNKLLLPLKESTQLQGSESYKECLALLGRVHAAMKMVRIGLVVPQLQYRMYGSLINQMAQVAQNYDREFKQFKLFIIQNQILGSYLLQQNRAFAERELQMESFHAAVISQRREELDNTFAKMDRLSGQMEAESSAMEQAKKEMDEGLRQFQNRQVANALFAVLSAVAQIGLAFLTAGATAPGAVASAGQAVSIAGQAAQGLRRVVEILEQLEAVMEVVAAVKDLVDSLEQVGQIVDAPVMPELPSEADWSIFVNEVEAVAEGMPTEVSEVPVWRAKCKNVAALGREMSITAVQMSELQYDIWVQGMMRDMARSQADRLAAIQPADLTNYLEMATQMDMRTTRMLLGLLNILRIQNAALRYEYLLMPTELTTWPLGMDTVGDLLIAQENAALIGLMQLGPSSDFTSRHVVKDIPVNLLLDGEDWEFEIPVQAGMSSFPSSWSRVRIRHLEMHFVKEASGIGGEIIHQPTTQTGTVYILLQGSTIFHDRRRDQVLPFQAAAPLNYHYAYRLDTGDSTLTNEPSEQFANKFMQMTPFTRWRLRLSASAKENAGLAFPTATALDSTTQIVITFHVTAIRQIDWRHDEE

SEQ ID NO: 274 - protein, 867 aa, synthetic construct
  REGION 1..867: note = PtIP-83 polypeptide variant
MALVDYGKLFEDLNQISMGVLDRVEFSEVMVIHRMYVRLADLNVGQLEGAEKVKRLYVFTDVVVLPVVEWRWPPQIPGSVTVIILCRLLQWPTDGRQSDTELHLTFMKLHAIQREENRWEITAADGMNWGVYIHAEEVQVGVLTMSWSSVLRVSALRSVITSGFRAVSVFEVPGSVRSTLGATLRPDHALYSTTMQATPNASHISAFNLRIVSPSAYRVCPLQNDTDTYLGIPADVAAVLPVDVVTDPNILLGMQTTVHIAELVKACHPSPDVVSAVGEHLNWLNKLLLPLKESTQLQGSESYKECLALLGRVHAAMKMVRIGLVVPQLQYRMYGSLINQMAQVAQNYDREFKQFKLFIIQNQILGSYLLQQNRAFAERELQMESFHAAVISQRREELDNTFAKMDRLSGQMEAESSAMEQAKKEMDEGLRQFQNRQVANALFAVLSAVAQIGLAFLTAGATAPGAVASAGQAVSIAGQAAQGLRRVVEILEQLEAVMEVVAAVKDLVDSLEQVGQIVDAPVMPELPSEADWSIFVNEVEAVAEGMPTEVSEVPVWRAKCKNVAALGREMSITAVQMSELQYDIWVQGMMRDMARSQADRLAAIQPADLTNYLEMATQMDMRTTRMLLGLLNILRIQNAALRYEYLLMPTELTTWPLGMDTVGDLLIAQENAALIGLMQLGPSSDFTSRHVVKDIPVNLLLDGEDWEFEIPVQAGMSSFPSSWSRVRIRHLEMHFVKEASGIGGEIIHQPTTQTGTVYILLQGSTIFHDRRRDQVLPFQAAAPLNYHYAYRLDTGDSTLTNEPSEQFANKFMQMTPFTRWRLRLSASAKENAGLAFPTATALDSTTQIVITFHVTAIRQIDWRHDEE

SEQ ID NO: 275 - protein, 867 aa, synthetic construct
  REGION 1..867: note = PtIP-83 polypeptide variant
MALVDYGKLFEDLNQISMGVLDRVEFSEVMVIHRMYVRLADLNVGQLEGAEKVMHLYIFADVIELPVVEWRWPPQIPGSVTVIILCRLLQWPTDGRQSDTELHLTFMKLHAIQREENRWEITAADGMNWGVYIHAEEVQVGVLTMSWSSVLRVSALRSVITSGFRAVSVFEVPGSVRSTLGATLRPDHALYSTTMQATPNASHISAFNLRIVSPSAYRVCPLQNDTDTYLGIPADVAAVLPVDVVTDPNILLGMQTTVHIAELVKACHPSPDVVSAVGEHLNWLNKLLLPLKESTQLQGSESYKECLALLGRVHAAMKMVRIGLVVPQLQYRMYGSLINQMAQVAQNYDREFKQFKLFIIQNQILGSYLLQQNRAFAERELQMESFHAAVISQRREELDNTFAKMDRLSGQMEAESSAMEQAKKEMDEGLRQFQNRQVANALFAVLSAVAQIGLAFLTAGATAPGAVASAGQAVSIAGQAAQGLRRVVEILEQLEAVMEVVAAVKDLVDSLEQVGQIVDAPVMPELPSEADWSIFVNEVEAVAEGMPTEVSEVPVWRAKCKNVAALGREMSITAVQMSELQYDIWVQGMMRDMARSQADRLAAIQPADLTNYLEMATQMDMRTTRMLLGLLNILRIQNAALRYEYLLMPTELTTWPLGMDTVGDLLIAQENAALIGLMQLGPSSDFTSRHVVKDIPVNLLLDGEDWEFEIPVQAGMSSFPSSWSRVRIRHLEMHFVKEASGIGGEIIHQPTTQTGTVYILLQGSTIFHDRRRDQVLPFQAAAPLNYHYAYRLDTGDSTLTNEPSEQFANKFMQMTPFTRWRLRLSASAKENAGLAFPTATALDSTTQIVITFHVTAIRQIDWRHDEE

SEQ ID NO: 276 - protein, 867 aa, synthetic construct
  REGION 1..867: note = PtIP-83 polypeptide variant
MALVDYGKLFEDLNQISMGVLDRVEFSEVMVIHRMYVRLADLNVGQLEGAEKVMQLYIFCDILELPVVEWRWPTQIPGSVTVIILCRLLQWPTDGRQSDTELHLTFMKLHAIQREENRWEITAADGMNWGVYIHAEEVQVGVLTMSWSSVLRVSALRSVITSGFRAVSVFEVPGSVRSTLGATLRPDHALYSTTMQATPNASHISAFNLRIVSPSAYRVCPLQNDTDTYLGIPADVAAVLPVDVVTDPNILLGMQTTVHIAELVKACHPSPDVVSAVGEHLNWLNKLLLPLKESTQLQGSESYKECLALLGRVHAAMKMVRIGLVVPQLQYRMYGSLINQMAQVAQNYDREFKQFKLFIIQNQILGSYLLQQNRAFAERELQMESFHAAVISQRREELDNTFAKMDRLSGQMEAESSAMEQAKKEMDEGLRQFQNRQVANALFAVLSAVAQIGLAFLTAGATAPGAVASAGQAVSIAGQAAQGLRRVVEILEQLEAVMEVVAAVKDLVDSLEQVGQIVDAPVMPELPSEADWSIFVNEVEAVAEGMPTEVSEVPVWRAKCKNVAALGREMSITAVQMSELQYDIWVQGMMRDMARSQADRLAAIQPADLTNYLEMATQMDMRTTRMLLGLLNILRIQNAALRYEYLLMPTELTTWPLGMDTVGDLLIAQENAALIGLMQLGPSSDFTSRHVVKDIPVNLLLDGEDWEFEIPVQAGMSSFPSSWSRVRIRHLEMHFVKEASGIGGEIIHQPTTQTGTVYILLQGSTIFHDRRRDQVLPFQAAAPLNYHYAYRLDTGDSTLTNEPSEQFANKFMQMTPFTRWRLRLSASAKENAGLAFPTATALDSTTQIVITFHVTAIRQIDWRHDEE

SEQ ID NO: 277 - protein, 867 aa, synthetic construct
  REGION 1..867: note = PtIP-83 polypeptide variant
MALVDYGKLFEDLNQISMGVLDRVEFSEVMVIHRMYVRLADLNVGQLEGAEKVMRLYIFADVVVLPVVEWRWPPQIPGSVTVIILCRLLQWPTDGRQSDTELHLTFMKLHAIQREENRWEITAADGMNWGVYIHAEEVQVGVLTMSWSSVLRVSALRSVITSGFRAVSVFEVPGSVRSTLGATLRPDHALYSTTMQATPNASHISAFNLRIVSPSAYRVCPLQNDTDTYLGIPADVAAVLPVDVVTDPNILLGMQTTVHIAELVKACHPSPDVVSAVGEHLNWLNKLLLPLKESTQLQGSESYKECLALLGRVHAAMKMVRIGLVVPQLQYRMYGSLINQMAQVAQNYDREFKQFKLFIIQNQILGSYLLQQNRAFAERELQMESFHAAVISQRREELDNTFAKMDRLSGQMEAESSAMEQAKKEMDEGLRQFQNRQVANALFAVLSAVAQIGLAFLTAGATAPGAVASAGQAVSIAGQAAQGLRRVVEILEQLEAVMEVVAAVKDLVDSLEQVGQIVDAPVMPELPSEADWSIFVNEVEAVAEGMPTEVSEVPVWRAKCKNVAALGREMSITAVQMSELQYDIWVQGMMRDMARSQADRLAAIQPADLTNYLEMATQMDMRTTRMLLGLLNILRIQNAALRYEYLLMPTELTTWPLGMDTVGDLLIAQENAALIGLMQLGPSSDFTSRHVVKDIPVNLLLDGEDWEFEIPVQAGMSSFPSSWSRVRIRHLEMHFVKEASGIGGEIIHQPTTQTGTVYILLQGSTIFHDRRRDQVLPFQAAAPLNYHYAYRLDTGDSTLTNEPSEQFANKFMQMTPFTRWRLRLSASAKENAGLAFPTATALDSTTQIVITFHVTAIRQIDWRHDEE

SEQ ID NO: 278 - protein, 867 aa, synthetic construct
  REGION 1..867: note = PtIP-83 polypeptide variant
MALVDYGKLFEDLNQISMGVLDRVEFSEVMVIHRMYVRLADLNVGQLEGAEKVMRLYIFCDVIELPVVEWRWPPQIPGSVTVIILCRLLQWPTDGRQSDTELHLTFMKLHAIQREENRWEITAADGMNWGVYIHAEEVQVGVLTMSWSSVLRVSALRSVITSGFRAVSVFEVPGSVRSTLGATLRPDHALYSTTMQATPNASHISAFNLRIVSPSAYRVCPLQNDTDTYLGIPADVAAVLPVDVVTDPNILLGMQTTVHIAELVKACHPSPDVVSAVGEHLNWLNKLLLPLKESTQLQGSESYKECLALLGRVHAAMKMVRIGLVVPQLQYRMYGSLINQMAQVAQNYDREFKQFKLFIIQNQILGSYLLQQNRAFAERELQMESFHAAVISQRREELDNTFAKMDRLSGQMEAESSAMEQAKKEMDEGLRQFQNRQVANALFAVLSAVAQIGLAFLTAGATAPGAVASAGQAVSIAGQAAQGLRRVVEILEQLEAVMEVVAAVKDLVDSLEQVGQIVDAPVMPELPSEADWSIFVNEVEAVAEGMPTEVSEVPVWRAKCKNVAALGREMSITAVQMSELQYDIWVQGMMRDMARSQADRLAAIQPADLTNYLEMATQMDMRTTRMLLGLLNILRIQNAALRYEYLLMPTELTTWPLGMDTVGDLLIAQENAALIGLMQLGPSSDFTSRHVVKDIPVNLLLDGEDWEFEIPVQAGMSSFPSSWSRVRIRHLEMHFVKEASGIGGEIIHQPTTQTGTVYILLQGSTIFHDRRRDQVLPFQAAAPLNYHYAYRLDTGDSTLTNEPSEQFANKFMQMTPFTRWRLRLSASAKENAGLAFPTATALDSTTQIVITFHVTAIRQIDWRHDEE

SEQ ID NO: 279 - protein, 867 aa, synthetic construct
  REGION 1..867: note = PtIP-83 polypeptide variant
MALVDYGKLFEDLNQISMGVLDRVEFSEVMVIHRMYVRLADLNVGQLEGAEKVMRLYVFCDIIELPVVEWRWPPQIPGSVTVIILCRLLQWPTDGRQSDTELHLTFMKLHAIQREENRWEITAADGMNWGVYIHAEEVQVGVLTMSWSSVLRVSALRSVITSGFRAVSVFEVPGSVRSTLGATLRPDHALYSTTMQATPNASHISAFNLRIVSPSAYRVCPLQNDTDTYLGIPADVAAVLPVDVVTDPNILLGMQTTVHIAELVKACHPSPDVVSAVGEHLNWLNKLLLPLKESTQLQGSESYKECLALLGRVHAAMKMVRIGLVVPQLQYRMYGSLINQMAQVAQNYDREFKQFKLFIIQNQILGSYLLQQNRAFAERELQMESFHAAVISQRREELDNTFAKMDRLSGQMEAESSAMEQAKKEMDEGLRQFQNRQVANALFAVLSAVAQIGLAFLTAGATAPGAVASAGQAVSIAGQAAQGLRRVVEILEQLEAVMEVVAAVKDLVDSLEQVGQIVDAPVMPELPSEADWSIFVNEVEAVAEGMPTEVSEVPVWRAKCKNVAALGREMSITAVQMSELQYDIWVQGMMRDMARSQADRLAAIQPADLTNYLEMATQMDMRTTRMLLGLLNILRIQNAALRYEYLLMPTELTTWPLGMDTVGDLLIAQENAALIGLMQLGPSSDFTSRHVVKDIPVNLLLDGEDWEFEIPVQAGMSSFPSSWSRVRIRHLEMHFVKEASGIGGEIIHQPTTQTGTVYILLQGSTIFHDRRRDQVLPFQAAAPLNYHYAYRLDTGDSTLTNEPSEQFANKFMQMTPFTRWRLRLSASAKENAGLAFPTATALDSTTQIVITFHVTAIRQIDWRHDEE

SEQ ID NO: 280 - protein, 867 aa, synthetic construct
  REGION 1..867: note = PtIP-83 polypeptide variant
MALVDYGKLFEDLNQISMGVLDRVEFSEVMVIHRMYVRLADLNVGQLEGAEKVMRLYVFCDILVLPVVEWRWPPQIPGSVTVIILCRLLQWPTDGRQSDTELHLTFMKLHAIQREENRWEITAADGMNWGVYIHAEEVQVGVLTMSWSSVLRVSALRSVITSGFRAVSVFEVPGSVRSTLGATLRPDHALYSTTMQATPNASHISAFNLRIVSPSAYRVCPLQNDTDTYLGIPADVAAVLPVDVVTDPNILLGMQTTVHIAELVKACHPSPDVVSAVGEHLNWLNKLLLPLKESTQLQGSESYKECLALLGRVHAAMKMVRIGLVVPQLQYRMYGSLINQMAQVAQNYDREFKQFKLFIIQNQILGSYLLQQNRAFAERELQMESFHAAVISQRREELDNTFAKMDRLSGQMEAESSAMEQAKKEMDEGLRQFQNRQVANALFAVLSAVAQIGLAFLTAGATAPGAVASAGQAVSIAGQAAQGLRRVVEILEQLEAVMEVVAAVKDLVDSLEQVGQIVDAPVMPELPSEADWSIFVNEVEAVAEGMPTEVSEVPVWRAKCKNVAALGREMSITAVQMSELQYDIWVQGMMRDMARSQADRLAAIQPADLTNYLEMATQMDMRTTRMLLGLLNILRIQNAALRYEYLLMPTELTTWPLGMDTVGDLLIAQENAALIGLMQLGPSSDFTSRHVVKDIPVNLLLDGEDWEFEIPVQAGMSSFPSSWSRVRIRHLEMHFVKEASGIGGEIIHQPTTQTGTVYILLQGSTIFHDRRRDQVLPFQAAAPLNYHYAYRLDTGDSTLTNEPSEQFANKFMQMTPFTRWRLRLSASAKENAGLAFPTATALDSTTQIVITFHVTAIRQIDWRHDEE

SEQ ID NO: 281 - protein, 867 aa, synthetic construct
  REGION 1..867: note = PtIP-83 polypeptide variant
MALVDYGKLFEDLNQISMGVLDRVEFSEVMVIHRMYVRLADLNVGQLEGAEKVMRLYVFSDIIVLPVVEWRWPPQIPGSVTVIILCRLLQWPTDGRQSDTELHLTFMKLHAIQREENRWEITAADGMNWGVYIHAEEVQVGVLTMSWSSVLRVSALRSVITSGFRAVSVFEVPGSVRSTLGATLRPDHALYSTTMQATPNASHISAFNLRIVSPSAYRVCPLQNDTDTYLGIPADVAAVLPVDVVTDPNILLGMQTTVHIAELVKACHPSPDVVSAVGEHLNWLNKLLLPLKESTQLQGSESYKECLALLGRVHAAMKMVRIGLVVPQLQYRMYGSLINQMAQVAQNYDREFKQFKLFIIQNQILGSYLLQQNRAFAERELQMESFHAAVISQRREELDNTFAKMDRLSGQMEAESSAMEQAKKEMDEGLRQFQNRQVANALFAVLSAVAQIGLAFLTAGATAPGAVASAGQAVSIAGQAAQGLRRVVEILEQLEAVMEVVAAVKDLVDSLEQVGQIVDAPVMPELPSEADWSIFVNEVEAVAEGMPTEVSEVPVWRAKCKNVAALGREMSITAVQMSELQYDIWVQGMMRDMARSQADRLAAIQPADLTNYLEMATQMDMRTTRMLLGLLNILRIQNAALRYEYLLMPTELTTWPLGMDTVGDLLIAQENAALIGLMQLGPSSDFTSRHVVKDIPVNLLLDGEDWEFEIPVQAGMSSFPSSWSRVRIRHLEMHFVKEASGIGGEIIHQPTTQTGTVYILLQGSTIFHDRRRDQVLPFQAAAPLNYHYAYRLDTGDSTLTNEPSEQFANKFMQMTPFTRWRLRLSASAKENAGLAFPTATALDSTTQIVITFHVTAIRQIDWRHDEE

SEQ ID NO: 282 - protein, 867 aa, synthetic construct
  REGION 1..867: note = PtIP-83 polypeptide variant
MALVDYGKLFEDLNQISMGVLDRVEFSEVMVIHRMYVRLADLNVGQLEGAEKVRHLYIFADIIELPVVEWRWPPQIPGSVTVIILCRLLQWPTDGRQSDTELHLTFMKLHAIQREENRWEITAADGMNWGVYIHAEEVQVGVLTMSWSSVLRVSALRSVITSGFRAVSVFEVPGSVRSTLGATLRPDHALYSTTMQATPNASHISAFNLRIVSPSAYRVCPLQNDTDTYLGIPADVAAVLPVDVVTDPNILLGMQTTVHIAELVKACHPSPDVVSAVGEHLNWLNKLLLPLKESTQLQGSESYKECLALLGRVHAAMKMVRIGLVVPQLQYRMYGSLINQMAQVAQNYDREFKQFKLFIIQNQILGSYLLQQNRAFAERELQMESFHAAVISQRREELDNTFAKMDRLSGQMEAESSAMEQAKKEMDEGLRQFQNRQVANALFAVLSAVAQIGLAFLTAGATAPGAVASAGQAVSIAGQAAQGLRRVVEILEQLEAVMEVVAAVKDLVDSLEQVGQIVDAPVMPELPSEADWSIFVNEVEAVAEGMPTEVSEVPVWRAKCKNVAALGREMSITAVQMSELQYDIWVQGMMRDMARSQADRLAAIQPADLTNYLEMATQMDMRTTRMLLGLLNILRIQNAALRYEYLLMPTELTTWPLGMDTVGDLLIAQENAALIGLMQLGPSSDFTSRHVVKDIPVNLLLDGEDWEFEIPVQAGMSSFPSSWSRVRIRHLEMHFVKEASGIGGEIIHQPTTQTGTVYILLQGSTIFHDRRRDQVLPFQAAAPLNYHYAYRLDTGDSTLTNEPSEQFANKFMQMTPFTRWRLRLSASAKENAGLAFPTATALDSTTQIVITFHVTAIRQIDWRHDEE

SEQ ID NO: 283 - protein, 867 aa, synthetic construct
  REGION 1..867: note = PtIP-83 polypeptide variant
MALVDYGKLFEDLNQISMGVLDRVEFSEVMVIHRMYVRLADLNVGQLEGAEKVRHLYIFADVVELPVVEWRWPPQIPGSVTVIILCRLLQWPTDGRQSDTELHLTFMKLHAIQREENRWEITAADGMNWGVYIHAEEVQVGVLTMSWSSVLRVSALRSVITSGFRAVSVFEVPGSVRSTLGATLRPDHALYSTTMQATPNASHISAFNLRIVSPSAYRVCPLQNDTDTYLGIPADVAAVLPVDVVTDPNILLGMQTTVHIAELVKACHPSPDVVSAVGEHLNWLNKLLLPLKESTQLQGSESYKECLALLGRVHAAMKMVRIGLVVPQLQYRMYGSLINQMAQVAQNYDREFKQFKLFIIQNQILGSYLLQQNRAFAERELQMESFHAAVISQRREELDNTFAKMDRLSGQMEAESSAMEQAKKEMDEGLRQFQNRQVANALFAVLSAVAQIGLAFLTAGATAPGAVASAGQAVSIAGQAAQGLRRVVEILEQLEAVMEVVAAVKDLVDSLEQVGQIVDAPVMPELPSEADWSIFVNEVEAVAEGMPTEVSEVPVWRAKCKNVAALGREMSITAVQMSELQYDIWVQGMMRDMARSQADRLAAIQPADLTNYLEMATQMDMRTTRMLLGLLNILRIQNAALRYEYLLMPTELTTWPLGMDTVGDLLIAQENAALIGLMQLGPSSDFTSRHVVKDIPVNLLLDGEDWEFEIPVQAGMSSFPSSWSRVRIRHLEMHFVKEASGIGGEIIHQPTTQTGTVYILLQGSTIFHDRRRDQVLPFQAAAPLNYHYAYRLDTGDSTLTNEPSEQFANKFMQMTPFTRWRLRLSASAKENAGLAFPTATALDSTTQIVITFHVTAIRQIDWRHDEE

SEQ ID NO: 284 - protein, 867 aa, synthetic construct
  REGION 1..867: note = PtIP-83 polypeptide variant
MALVDYGKLFEDLNQISMGVLDRVEFSEVMVIHRMYVRLADLNVGQLEGAEKVRHLYIFCDVIELPVVEWRWPPQIPGSVTVIILCRLLQWPTDGRQSDTELHLTFMKLHAIQREENRWEITAADGMNWGVYIHAEEVQVGVLTMSWSSVLRVSALRSVITSGFRAVSVFEVPGSVRSTLGATLRPDHALYSTTMQATPNASHISAFNLRIVSPSAYRVCPLQNDTDTYLGIPADVAAVLPVDVVTDPNILLGMQTTVHIAELVKACHPSPDVVSAVGEHLNWLNKLLLPLKESTQLQGSESYKECLALLGRVHAAMKMVRIGLVVPQLQYRMYGSLINQMAQVAQNYDREFKQFKLFIIQNQILGSYLLQQNRAFAERELQMESFHAAVISQRREELDNTFAKMDRLSGQMEAESSAMEQAKKEMDEGLRQFQNRQVANALFAVLSAVAQIGLAFLTAGATAPGAVASAGQAVSIAGQAAQGLRRVVEILEQLEAVMEVVAAVKDLVDSLEQVGQIVDAPVMPELPSEADWSIFVNEVEAVAEGMPTEVSEVPVWRAKCKNVAALGREMSITAVQMSELQYDIWVQGMMRDMARSQADRLAAIQPADLTNYLEMATQMDMRTTRMLLGLLNILRIQNAALRYEYLLMPTELTTWPLGMDTVGDLLIAQENAALIGLMQLGPSSDFTSRHVVKDIPVNLLLDGEDWEFEIPVQAGMSSFPSSWSRVRIRHLEMHFVKEASGIGGEIIHQPTTQTGTVYILLQGSTIFHDRRRDQVLPFQAAAPLNYHYAYRLDTGDSTLTNEPSEQFANKFMQMTPFTRWRLRLSASAKENAGLAFPTATALDSTTQIVITFHVTAIRQIDWRHDEE

SEQ ID NO: 285 - protein, 867 aa, synthetic construct
  REGION 1..867: note = PtIP-83 polypeptide variant
MALVDYGKLFEDLNQISMGVLDRVEFSEVMVIHRMYVRLADLNVGQLEGAEKVRHLYIFSDVIELPVVEWRWPPQIPGSVTVIILCRLLQWPTDGRQSDTELHLTFMKLHAIQREENRWEITAADGMNWGVYIHAEEVQVGVLTMSWSSVLRVSALRSVITSGFRAVSVFEVPGSVRSTLGATLRPDHALYSTTMQATPNASHISAFNLRIVSPSAYRVCPLQNDTDTYLGIPADVAAVLPVDVVTDPNILLGMQTTVHIAELVKACHPSPDVVSAVGEHLNWLNKLLLPLKESTQLQGSESYKECLALLGRVHAAMKMVRIGLVVPQLQYRMYGSLINQMAQVAQNYDREFKQFKLFIIQNQILGSYLLQQNRAFAERELQMESFHAAVISQRREELDNTFAKMDRLSGQMEAESSAMEQAKKEMDEGLRQFQNRQVANALFAVLSAVAQIGLAFLTAGATAPGAVASAGQAVSIAGQAAQGLRRVVEILEQLEAVMEVVAAVKDLVDSLEQVGQIVDAPVMPELPSEADWSIFVNEVEAVAEGMPTEVSEVPVWRAKCKNVAALGREMSITAVQMSELQYDIWVQGMMRDMARSQADRLAAIQPADLTNYLEMATQMDMRTTRMLLGLLNILRIQNAALRYEYLLMPTELTTWPLGMDTVGDLLIAQENAALIGLMQLGPSSDFTSRHVVKDIPVNLLLDGEDWEFEIPVQAGMSSFPSSWSRVRIRHLEMHFVKEASGIGGEIIHQPTTQTGTVYILLQGSTIFHDRRRDQVLPFQAAAPLNYHYAYRLDTGDSTLTNEPSEQFANKFMQMTPFTRWRLRLSASAKENAGLAFPTATALDSTTQIVITFHVTAIRQIDWRHDEE

SEQ ID NO: 286 - protein, 867 aa, synthetic construct
  REGION 1..867: note = PtIP-83 polypeptide variant
MALVDYGKLFEDLNQISMGVLDRVEFSEVMVIHRMYVRLADLNVGQLEGAEKVRHLYIFSDVVELPVVEWRWPPQIPGSVTVIILCRLLQWPTDGRQSDTELHLTFMKLHAIQREENRWEITAADGMNWGVYIHAEEVQVGVLTMSWSSVLRVSALRSVITSGFRAVSVFEVPGSVRSTLGATLRPDHALYSTTMQATPNASHISAFNLRIVSPSAYRVCPLQNDTDTYLGIPADVAAVLPVDVVTDPNILLGMQTTVHIAELVKACHPSPDVVSAVGEHLNWLNKLLLPLKESTQLQGSESYKECLALLGRVHAAMKMVRIGLVVPQLQYRMYGSLINQMAQVAQNYDREFKQFKLFIIQNQILGSYLLQQNRAFAERELQMESFHAAVISQRREELDNTFAKMDRLSGQMEAESSAMEQAKKEMDEGLRQFQNRQVANALFAVLSAVAQIGLAFLTAGATAPGAVASAGQAVSIAGQAAQGLRRVVEILEQLEAVMEVVAAVKDLVDSLEQVGQIVDAPVMPELPSEADWSIFVNEVEAVAEGMPTEVSEVPVWRAKCKNVAALGREMSITAVQMSELQYDIWVQGMMRDMARSQADRLAAIQPADLTNYLEMATQMDMRTTRMLLGLLNILRIQNAALRYEYLLMPTELTTWPLGMDTVGDLLIAQENAALIGLMQLGPSSDFTSRHVVKDIPVNLLLDGEDWEFEIPVQAGMSSFPSSWSRVRIRHLEMHFVKEASGIGGEIIHQPTTQTGTVYILLQGSTIFHDRRRDQVLPFQAAAPLNYHYAYRLDTGDSTLTNEPSEQFANKFMQMTPFTRWRLRLSASAKENAGLAFPTATALDSTTQIVITFHVTAIRQIDWRHDEE

SEQ ID NO: 287 - protein, 867 aa, synthetic construct
  REGION 1..867: note = PtIP-83 polypeptide variant
MALVDYGKLFEDLNQISMGVLDRVEFSEVMVIHRMYVRLADLNVGQLEGAEKVRHLYVFTDVLELPVVEWRWPPQIPGSVTVIILCRLLQWPTDGRQSDTELHLTFMKLHAIQREENRWEITAADGMNWGVYIHAEEVQVGVLTMSWSSVLRVSALRSVITSGFRAVSVFEVPGSVRSTLGATLRPDHALYSTTMQATPNASHISAFNLRIVSPSAYRVCPLQNDTDTYLGIPADVAAVLPVDVVTDPNILLGMQTTVHIAELVKACHPSPDVVSAVGEHLNWLNKLLLPLKESTQLQGSESYKECLALLGRVHAAMKMVRIGLVVPQLQYRMYGSLINQMAQVAQNYDREFKQFKLFIIQNQILGSYLLQQNRAFAERELQMESFHAAVISQRREELDNTFAKMDRLSGQMEAESSAMEQAKKEMDEGLRQFQNRQVANALFAVLSAVAQIGLAFLTAGATAPGAVASAGQAVSIAGQAAQGLRRVVEILEQLEAVMEVVAAVKDLVDSLEQVGQIVDAPVMPELPSEADWSIFVNEVEAVAEGMPTEVSEVPVWRAKCKNVAALGREMSITAVQMSELQYDIWVQGMMRDMARSQADRLAAIQPADLTNYLEMATQMDMRTTRMLLGLLNILRIQNAALRYEYLLMPTELTTWPLGMDTVGDLLIAQENAALIGLMQLGPSSDFTSRHVVKDIPVNLLLDGEDWEFEIPVQAGMSSFPSSWSRVRIRHLEMHFVKEASGIGGEIIHQPTTQTGTVYILLQGSTIFHDRRRDQVLPFQAAAPLNYHYAYRLDTGDSTLTNEPSEQFANKFMQMTPFTRWRLRLSASAKENAGLAFPTATALDSTTQIVITFHVTAIRQIDWRHDEE

SEQ ID NO: 288 - protein, 867 aa, synthetic construct
  REGION 1..867: note = PtIP-83 polypeptide variant
MALVDYGKLFEDLNQISMGVLDRVEFSEVMVIHRMYVRLADLNVGQLEGAEKVRQLYIFCDVIVLPVVEWRWPPQIPGSVTVIILCRLLQWPTDGRQSDTELHLTFMKLHAIQREENRWEITAADGMNWGVYIHAEEVQVGVLTMSWSSVLRVSALRSVITSGFRAVSVFEVPGSVRSTLGATLRPDHALYSTTMQATPNASHISAFNLRIVSPSAYRVCPLQNDTDTYLGIPADVAAVLPVDVVTDPNILLGMQTTVHIAELVKACHPSPDVVSAVGEHLNWLNKLLLPLKESTQLQGSESYKECLALLGRVHAAMKMVRIGLVVPQLQYRMYGSLINQMAQVAQNYDREFKQFKLFIIQNQILGSYLLQQNRAFAERELQMESFHAAVISQRREELDNTFAKMDRLSGQMEAESSAMEQAKKEMDEGLRQFQNRQVANALFAVLSAVAQIGLAFLTAGATAPGAVASAGQAVSIAGQAAQGLRRVVEILEQLEAVMEVVAAVKDLVDSLEQVGQIVDAPVMPELPSEADWSIFVNEVEAVAEGMPTEVSEVPVWRAKCKNVAALGREMSITAVQMSELQYDIWVQGMMRDMARSQADRLAAIQPADLTNYLEMATQMDMRTTRMLLGLLNILRIQNAALRYEYLLMPTELTTWPLGMDTVGDLLIAQENAALIGLMQLGPSSDFTSRHVVKDIPVNLLLDGEDWEFEIPVQAGMSSFPSSWSRVRIRHLEMHFVKEASGIGGEIIHQPTTQTGTVYILLQGSTIFHDRRRDQVLPFQAAAPLNYHYAYRLDTGDSTLTNEPSEQFANKFMQMTPFTRWRLRLSASAKENAGLAFPTATALDSTTQIVITFHVTAIRQIDWRHDEE

SEQ ID NO: 289 - protein, 867 aa, synthetic construct
  REGION 1..867: note = PtIP-83 polypeptide variant
MALVDYGKLFEDLNQISMGVLDRVEFSEVMVIHRMYVRLADLNVGQLEGAEKVRQLYIFSDVVVLPVVEWRWPPQIPGSVTVIILCRLLQWPTDGRQSDTELHLTFMKLHAIQREENRWEITAADGMNWGVYIHAEEVQVGVLTMSWSSVLRVSALRSVITSGFRAVSVFEVPGSVRSTLGATLRPDHALYSTTMQATPNASHISAFNLRIVSPSAYRVCPLQNDTDTYLGIPADVAAVLPVDVVTDPNILLGMQTTVHIAELVKACHPSPDVVSAVGEHLNWLNKLLLPLKESTQLQGSESYKECLALLGRVHAAMKMVRIGLVVPQLQYRMYGSLINQMAQVAQNYDREFKQFKLFIIQNQILGSYLLQQNRAFAERELQMESFHAAVISQRREELDNTFAKMDRLSGQMEAESSAMEQAKKEMDEGLRQFQNRQVANALFAVLSAVAQIGLAFLTAGATAPGAVASAGQAVSIAGQAAQGLRRVVEILEQLEAVMEVVAAVKDLVDSLEQVGQIVDAPVMPELPSEADWSIFVNEVEAVAEGMPTEVSEVPVWRAKCKNVAALGREMSITAVQMSELQYDIWVQGMMRDMARSQADRLAAIQPADLTNYLEMATQMDMRTTRMLLGLLNILRIQNAALRYEYLLMPTELTTWPLGMDTVGDLLIAQENAALIGLMQLGPSSDFTSRHVVKDIPVNLLLDGEDWEFEIPVQAGMSSFPSSWSRVRIRHLEMHFVKEASGIGGEIIHQPTTQTGTVYILLQGSTIFHDRRRDQVLPFQAAAPLNYHYAYRLDTGDSTLTNEPSEQFANKFMQMTPFTRWRLRLSASAKENAGLAFPTATALDSTTQIVITFHVTAIRQIDWRHDEE

SEQ ID NO: 290 - protein, 867 aa, synthetic construct
  REGION 1..867: note = PtIP-83 polypeptide variant
MALVDYGKLFEDLNQISMGVLDRVEFSEVMVIHRMYVRLADLNVGQLEGAEKVRQLYVFCDVLVLPVVEWRWPPQIPGSVTVIILCRLLQWPTDGRQSDTELHLTFMKLHAIQREENRWEITAADGMNWGVYIHAEEVQVGVLTMSWSSVLRVSALRSVITSGFRAVSVFEVPGSVRSTLGATLRPDHALYSTTMQATPNASHISAFNLRIVSPSAYRVCPLQNDTDTYLGIPADVAAVLPVDVVTDPNILLGMQTTVHIAELVKACHPSPDVVSAVGEHLNWLNKLLLPLKESTQLQGSESYKECLALLGRVHAAMKMVRIGLVVPQLQYRMYGSLINQMAQVAQNYDREFKQFKLFIIQNQILGSYLLQQNRAFAERELQMESFHAAVISQRREELDNTFAKMDRLSGQMEAESSAMEQAKKEMDEGLRQFQNRQVANALFAVLSAVAQIGLAFLTAGATAPGAVASAGQAVSIAGQAAQGLRRVVEILEQLEAVMEVVAAVKDLVDSLEQVGQIVDAPVMPELPSEADWSIFVNEVEAVAEGMPTEVSEVPVWRAKCKNVAALGREMSITAVQMSELQYDIWVQGMMRDMARSQADRLAAIQPADLTNYLEMATQMDMRTTRMLLGLLNILRIQNAALRYEYLLMPTELTTWPLGMDTVGDLLIAQENAALIGLMQLGPSSDFTSRHVVKDIPVNLLLDGEDWEFEIPVQAGMSSFPSSWSRVRIRHLEMHFVKEASGIGGEIIHQPTTQTGTVYILLQGSTIFHDRRRDQVLPFQAAAPLNYHYAYRLDTGDSTLTNEPSEQFANKFMQMTPFTRWRLRLSASAKENAGLAFPTATALDSTTQIVITFHVTAIRQIDWRHDEE

SEQ ID NO: 291 - protein, 867 aa, synthetic construct
  REGION 1..867: note = PtIP-83 polypeptide variant
MALVDYGKLFEDLNQISMGVLDRVEFSEVMVIHRMYVRLADLNVGQLEGAEKVRRLYIFADILELPVVEWRWPPQIPGSVTVIILCRLLQWPTDGRQSDTELHLTFMKLHAIQREENRWEITAADGMNWGVYIHAEEVQVGVLTMSWSSVLRVSALRSVITSGFRAVSVFEVPGSVRSTLGATLRPDHALYSTTMQATPNASHISAFNLRIVSPSAYRVCPLQNDTDTYLGIPADVAAVLPVDVVTDPNILLGMQTTVHIAELVKACHPSPDVVSAVGEHLNWLNKLLLPLKESTQLQGSESYKECLALLGRVHAAMKMVRIGLVVPQLQYRMYGSLINQMAQVAQNYDREFKQFKLFIIQNQILGSYLLQQNRAFAERELQMESFHAAVISQRREELDNTFAKMDRLSGQMEAESSAMEQAKKEMDEGLRQFQNRQVANALFAVLSAVAQIGLAFLTAGATAPGAVASAGQAVSIAGQAAQGLRRVVEILEQLEAVMEVVAAVKDLVDSLEQVGQIVDAPVMPELPSEADWSIFVNEVEAVAEGMPTEVSEVPVWRAKCKNVAALGREMSITAVQMSELQYDIWVQGMMRDMARSQADRLAAIQPADLTNYLEMATQMDMRTTRMLLGLLNILRIQNAALRYEYLLMPTELTTWPLGMDTVGDLLIAQENAALIGLMQLGPSSDFTSRHVVKDIPVNLLLDGEDWEFEIPVQAGMSSFPSSWSRVRIRHLEMHFVKEASGIGGEIIHQPTTQTGTVYILLQGSTIFHDRRRDQVLPFQAAAPLNYHYAYRLDTGDSTLTNEPSEQFANKFMQMTPFTRWRLRLSASAKENAGLAFPTATALDSTTQIVITFHVTAIRQIDWRHDEE

SEQ ID NO: 292 - protein, 867 aa, synthetic construct
  REGION 1..867: note = PtIP-83 polypeptide variant
MALVDYGKLFEDLNQISMGVLDRVEFSEVMVIHRMYVRLADLNVGQLEGAEKVRRLYIFADIVELPVVEWRWPAQIPGSVTVIILCRLLQWPTDGRQSDTELHLTFMKLHAIQREENRWEITAADGMNWGVYIHAEEVQVGVLTMSWSSVLRVSALRSVITSGFRAVSVFEVPGSVRSTLGATLRPDHALYSTTMQATPNASHISAFNLRIVSPSAYRVCPLQNDTDTYLGIPADVAAVLPVDVVTDPNILLGMQTTVHIAELVKACHPSPDVVSAVGEHLNWLNKLLLPLKESTQLQGSESYKECLALLGRVHAAMKMVRIGLVVPQLQYRMYGSLINQMAQVAQNYDREFKQFKLFIIQNQILGSYLLQQNRAFAERELQMESFHAAVISQRREELDNTFAKMDRLSGQMEAESSAMEQAKKEMDEGLRQFQNRQVANALFAVLSAVAQIGLAFLTAGATAPGAVASAGQAVSIAGQAAQGLRRVVEILEQLEAVMEVVAAVKDLVDSLEQVGQIVDAPVMPELPSEADWSIFVNEVEAVAEGMPTEVSEVPVWRAKCKNVAALGREMSITAVQMSELQYDIWVQGMMRDMARSQADRLAAIQPADLTNYLEMATQMDMRTTRMLLGLLNILRIQNAALRYEYLLMPTELTTWPLGMDTVGDLLIAQENAALIGLMQLGPSSDFTSRHVVKDIPVNLLLDGEDWEFEIPVQAGMSSFPSSWSRVRIRHLEMHFVKEASGIGGEIIHQPTTQTGTVYILLQGSTIFHDRRRDQVLPFQAAAPLNYHYAYRLDTGDSTLTNEPSEQFANKFMQMTPFTRWRLRLSASAKENAGLAFPTATALDSTTQIVITFHVTAIRQIDWRHDEE

SEQ ID NO: 293 - protein, 867 aa, synthetic construct
  REGION 1..867: note = PtIP-83 polypeptide variant
MALVDYGKLFEDLNQISMGVLDRVEFSEVMVIHRMYVRLADLNVGQLEGAEKVRRLYIFGDIVELPVVEWRWPPQIPGSVTVIILCRLLQWPTDGRQSDTELHLTFMKLHAIQREENRWEITAADGMNWGVYIHAEEVQVGVLTMSWSSVLRVSALRSVITSGFRAVSVFEVPGSVRSTLGATLRPDHALYSTTMQATPNASHISAFNLRIVSPSAYRVCPLQNDTDTYLGIPADVAAVLPVDVVTDPNILLGMQTTVHIAELVKACHPSPDVVSAVGEHLNWLNKLLLPLKESTQLQGSESYKECLALLGRVHAAMKMVRIGLVVPQLQYRMYGSLINQMAQVAQNYDREFKQFKLFIIQNQILGSYLLQQNRAFAERELQMESFHAAVISQRREELDNTFAKMDRLSGQMEAESSAMEQAKKEMDEGLRQFQNRQVANALFAVLSAVAQIGLAFLTAGATAPGAVASAGQAVSIAGQAAQGLRRVVEILEQLEAVMEVVAAVKDLVDSLEQVGQIVDAPVMPELPSEADWSIFVNEVEAVAEGMPTEVSEVPVWRAKCKNVAALGREMSITAVQMSELQYDIWVQGMMRDMARSQADRLAAIQPADLTNYLEMATQMDMRTTRMLLGLLNILRIQNAALRYEYLLMPTELTTWPLGMDTVGDLLIAQENAALIGLMQLGPSSDFTSRHVVKDIPVNLLLDGEDWEFEIPVQAGMSSFPSSWSRVRIRHLEMHFVKEASGIGGEIIHQPTTQTGTVYILLQGSTIFHDRRRDQVLPFQAAAPLNYHYAYRLDTGDSTLTNEPSEQFANKFMQMTPFTRWRLRLSASAKENAGLAFPTATALDSTTQIVITFHVTAIRQIDWRHDEE

SEQ ID NO: 294 - protein, 867 aa, synthetic construct
  REGION 1..867: note = PtIP-83 polypeptide variant
MALVDYGKLFEDLNQISMGVLDRVEFSEVMVIHRMYVRLADLNVGQLEGAEKVRRLYIFTDIIELPVVEWRWPPQIPGSVTVIILCRLLQWPTDGRQSDTELHLTFMKLHAIQREENRWEITAADGMNWGVYIHAEEVQVGVLTMSWSSVLRVSALRSVITSGFRAVSVFEVPGSVRSTLGATLRPDHALYSTTMQATPNASHISAFNLRIVSPSAYRVCPLQNDTDTYLGIPADVAAVLPVDVVTDPNILLGMQTTVHIAELVKACHPSPDVVSAVGEHLNWLNKLLLPLKESTQLQGSESYKECLALLGRVHAAMKMVRIGLVVPQLQYRMYGSLINQMAQVAQNYDREFKQFKLFIIQNQILGSYLLQQNRAFAERELQMESFHAAVISQRREELDNTFAKMDRLSGQMEAESSAMEQAKKEMDEGLRQFQNRQVANALFAVLSAVAQIGLAFLTAGATAPGAVASAGQAVSIAGQAAQGLRRVVEILEQLEAVMEVVAAVKDLVDSLEQVGQIVDAPVMPELPSEADWSIFVNEVEAVAEGMPTEVSEVPVWRAKCKNVAALGREMSITAVQMSELQYDIWVQGMMRDMARSQADRLAAIQPADLTNYLEMATQMDMRTTRMLLGLLNILRIQNAALRYEYLLMPTELTTWPLGMDTVGDLLIAQENAALIGLMQLGPSSDFTSRHVVKDIPVNLLLDGEDWEFEIPVQAGMSSFPSSWSRVRIRHLEMHFVKEASGIGGEIIHQPTTQTGTVYILLQGSTIFHDRRRDQVLPFQAAAPLNYHYAYRLDTGDSTLTNEPSEQFANKFMQMTPFTRWRLRLSASAKENAGLAFPTATALDSTTQIVITFHVTAIRQIDWRHDEE

SEQ ID NO: 295 - protein, 867 aa, synthetic construct
  REGION 1..867: note = PtIP-83 polypeptide variant
MALVDYGKLFEDLNQISMGVLDRVEFSEVMVIHRMYVRLADLNVGQLEGAEKVRRLYVFADIIDLPVVEWRWPPQIPGSVTVIILCRLLQWPTDGRQSDTELHLTFMKLHAIQREENRWEITAADGMNWGVYIHAEEVQVGVLTMSWSSVLRVSALRSVITSGFRAVSVFEVPGSVRSTLGATLRPDHALYSTTMQATPNASHISAFNLRIVSPSAYRVCPLQNDTDTYLGIPADVAAVLPVDVVTDPNILLGMQTTVHIAELVKACHPSPDVVSAVGEHLNWLNKLLLPLKESTQLQGSESYKECLALLGRVHAAMKMVRIGLVVPQLQYRMYGSLINQMAQVAQNYDREFKQFKLFIIQNQILGSYLLQQNRAFAERELQMESFHAAVISQRREELDNTFAKMDRLSGQMEAESSAMEQAKKEMDEGLRQFQNRQVANALFAVLSAVAQIGLAFLTAGATAPGAVASAGQAVSIAGQAAQGLRRVVEILEQLEAVMEVVAAVKDLVDSLEQVGQIVDAPVMPELPSEADWSIFVNEVEAVAEGMPTEVSEVPVWRAKCKNVAALGREMSITAVQMSELQYDIWVQGMMRDMARSQADRLAAIQPADLTNYLEMATQMDMRTTRMLLGLLNILRIQNAALRYEYLLMPTELTTWPLGMDTVGDLLIAQENAALIGLMQLGPSSDFTSRHVVKDIPVNLLLDGEDWEFEIPVQAGMSSFPSSWSRVRIRHLEMHFVKEASGIGGEIIHQPTTQTGTVYILLQGSTIFHDRRRDQVLPFQAAAPLNYHYAYRLDTGDSTLTNEPSEQFANKFMQMTPFTRWRLRLSASAKENAGLAFPTATALDSTTQIVITFHVTAIRQIDWRHDEE

SEQ ID NO: 296 - protein, 867 aa, synthetic construct
  REGION 1..867: note = PtIP-83 polypeptide variant
MALVDYGKLFEDLNQISMGVLDRVEFSEVMVIHRMYVRLADLNVGQLEGAEKVRRLYVFADIVVLPVVEWRWPPQIPGSVTVIILCRLLQWPTDGRQSDTELHLTFMKLHAIQREENRWEITAADGMNWGVYIHAEEVQVGVLTMSWSSVLRVSALRSVITSGFRAVSVFEVPGSVRSTLGATLRPDHALYSTTMQATPNASHISAFNLRIVSPSAYRVCPLQNDTDTYLGIPADVAAVLPVDVVTDPNILLGMQTTVHIAELVKACHPSPDVVSAVGEHLNWLNKLLLPLKESTQLQGSESYKECLALLGRVHAAMKMVRIGLVVPQLQYRMYGSLINQMAQVAQNYDREFKQFKLFIIQNQILGSYLLQQNRAFAERELQMESFHAAVISQRREELDNTFAKMDRLSGQMEAESSAMEQAKKEMDEGLRQFQNRQVANALFAVLSAVAQIGLAFLTAGATAPGAVASAGQAVSIAGQAAQGLRRVVEILEQLEAVMEVVAAVKDLVDSLEQVGQIVDAPVMPELPSEADWSIFVNEVEAVAEGMPTEVSEVPVWRAKCKNVAALGREMSITAVQMSELQYDIWVQGMMRDMARSQADRLAAIQPADLTNYLEMATQMDMRTTRMLLGLLNILRIQNAALRYEYLLMPTELTTWPLGMDTVGDLLIAQENAALIGLMQLGPSSDFTSRHVVKDIPVNLLLDGEDWEFEIPVQAGMSSFPSSWSRVRIRHLEMHFVKEASGIGGEIIHQPTTQTGTVYILLQGSTIFHDRRRDQVLPFQAAAPLNYHYAYRLDTGDSTLTNEPSEQFANKFMQMTPFTRWRLRLSASAKENAGLAFPTATALDSTTQIVITFHVTAIRQIDWRHDEE

SEQ ID NO: 297 - protein, 867 aa, synthetic construct
  REGION 1..867: note = PtIP-83 polypeptide variant
MALVDYGKLFEDLNQISMGVLDRVEFSEVMVIHRMYVRLADLNVGQLEGAEKVRRLYVFCDVVVLPVVEWRWPPQIPGSVTVIILCRLLQWPTDGRQSDTELHLTFMKLHAIQREENRWEITAADGMNWGVYIHAEEVQVGVLTMSWSSVLRVSALRSVITSGFRAVSVFEVPGSVRSTLGATLRPDHALYSTTMQATPNASHISAFNLRIVSPSAYRVCPLQNDTDTYLGIPADVAAVLPVDVVTDPNILLGMQTTVHIAELVKACHPSPDVVSAVGEHLNWLNKLLLPLKESTQLQGSESYKECLALLGRVHAAMKMVRIGLVVPQLQYRMYGSLINQMAQVAQNYDREFKQFKLFIIQNQILGSYLLQQNRAFAERELQMESFHAAVISQRREELDNTFAKMDRLSGQMEAESSAMEQAKKEMDEGLRQFQNRQVANALFAVLSAVAQIGLAFLTAGATAPGAVASAGQAVSIAGQAAQGLRRVVEILEQLEAVMEVVAAVKDLVDSLEQVGQIVDAPVMPELPSEADWSIFVNEVEAVAEGMPTEVSEVPVWRAKCKNVAALGREMSITAVQMSELQYDIWVQGMMRDMARSQADRLAAIQPADLTNYLEMATQMDMRTTRMLLGLLNILRIQNAALRYEYLLMPTELTTWPLGMDTVGDLLIAQENAALIGLMQLGPSSDFTSRHVVKDIPVNLLLDGEDWEFEIPVQAGMSSFPSSWSRVRIRHLEMHFVKEASGIGGEIIHQPTTQTGTVYILLQGSTIFHDRRRDQVLPFQAAAPLNYHYAYRLDTGDSTLTNEPSEQFANKFMQMTPFTRWRLRLSASAKENAGLAFPTATALDSTTQIVITFHVTAIRQIDWRHDEE

SEQ ID NO: 298 - protein, 867 aa, synthetic construct
  REGION 1..867: note = PtIP-83 polypeptide variant
MALVDYGKLFEDLNQISMGVLDRVEFSEVMVIHRMYVRLADLNVGQLEGAEKVRRLYVFTDIIELPVVEWRWPPQIPGSVTVIILCRLLQWPTDGRQSDTELHLTFMKLHAIQREENRWEITAADGMNWGVYIHAEEVQVGVLTMSWSSVLRVSALRSVITSGFRAVSVFEVPGSVRSTLGATLRPDHALYSTTMQATPNASHISAFNLRIVSPSAYRVCPLQNDTDTYLGIPADVAAVLPVDVVTDPNILLGMQTTVHIAELVKACHPSPDVVSAVGEHLNWLNKLLLPLKESTQLQGSESYKECLALLGRVHAAMKMVRIGLVVPQLQYRMYGSLINQMAQVAQNYDREFKQFKLFIIQNQILGSYLLQQNRAFAERELQMESFHAAVISQRREELDNTFAKMDRLSGQMEAESSAMEQAKKEMDEGLRQFQNRQVANALFAVLSAVAQIGLAFLTAGATAPGAVASAGQAVSIAGQAAQGLRRVVEILEQLEAVMEVVAAVKDLVDSLEQVGQIVDAPVMPELPSEADWSIFVNEVEAVAEGMPTEVSEVPVWRAKCKNVAALGREMSITAVQMSELQYDIWVQGMMRDMARSQADRLAAIQPADLTNYLEMATQMDMRTTRMLLGLLNILRIQNAALRYEYLLMPTELTTWPLGMDTVGDLLIAQENAALIGLMQLGPSSDFTSRHVVKDIPVNLLLDGEDWEFEIPVQAGMSSFPSSWSRVRIRHLEMHFVKEASGIGGEIIHQPTTQTGTVYILLQGSTIFHDRRRDQVLPFQAAAPLNYHYAYRLDTGDSTLTNEPSEQFANKFMQMTPFTRWRLRLSASAKENAGLAFPTATALDSTTQIVITFHVTAIRQIDWRHDEE

SEQ ID NO: 299 - protein, 867 aa, synthetic construct
  REGION 1..867: note = PtIP-83 polypeptide variant
MALVDYGKLFEDLNQISMGVLDRVEFSEVMVIHRMYVRLADLNVGQLEGAEKVRRLYVFTDVLVLPVVEWRWPPQIPGSVTVIILCRLLQWPTDGRQSDTELHLTFMKLHAIQREENRWEITAADGMNWGVYIHAEEVQVGVLTMSWSSVLRVSALRSVITSGFRAVSVFEVPGSVRSTLGATLRPDHALYSTTMQATPNASHISAFNLRIVSPSAYRVCPLQNDTDTYLGIPADVAAVLPVDVVTDPNILLGMQTTVHIAELVKACHPSPDVVSAVGEHLNWLNKLLLPLKESTQLQGSESYKECLALLGRVHAAMKMVRIGLVVPQLQYRMYGSLINQMAQVAQNYDREFKQFKLFIIQNQILGSYLLQQNRAFAERELQMESFHAAVISQRREELDNTFAKMDRLSGQMEAESSAMEQAKKEMDEGLRQFQNRQVANALFAVLSAVAQIGLAFLTAGATAPGAVASAGQAVSIAGQAAQGLRRVVEILEQLEAVMEVVAAVKDLVDSLEQVGQIVDAPVMPELPSEADWSIFVNEVEAVAEGMPTEVSEVPVWRAKCKNVAALGREMSITAVQMSELQYDIWVQGMMRDMARSQADRLAAIQPADLTNYLEMATQMDMRTTRMLLGLLNILRIQNAALRYEYLLMPTELTTWPLGMDTVGDLLIAQENAALIGLMQLGPSSDFTSRHVVKDIPVNLLLDGEDWEFEIPVQAGMSSFPSSWSRVRIRHLEMHFVKEASGIGGEIIHQPTTQTGTVYILLQGSTIFHDRRRDQVLPFQAAAPLNYHYAYRLDTGDSTLTNEPSEQFANKFMQMTPFTRWRLRLSASAKENAGLAFPTATALDSTTQIVITFHVTAIRQIDWRHDEE

SEQ ID NO: 300 - DNA, 2601 bp, synthetic construct
  misc_feature 1..2601: note = PtIP-83 polypeptide variant encoding polynucleotide
  source 1..2601: mol_type = other DNA
atggctctcgtggattacggcaagcttttcgaggatctgaaccagataagcatgggtgtactggatcgggtagagttttcagaggtgatggtgatccacaggatgtatgtgaggctagctgatctgaatgtggggcagctcgagggagccgagaaagtgaagcggttgtatgtgtttgcggacgtggtggagctaccagtcgtggaatggcggtggccgccgcaaataccaggatcggtgacggtgatcatattgtgtcgtcttcttcaatggccaactgatgggaggcagtcggacaccgagctccacctgacattcatgaagttgcatgccatacaacgagaggaaaatcggtgggagataaccgcagcagatggcatgaactggggagtttacatacacgcagaggaagtacaggttggcgtgctgacaatgtcatggtcttcggtacttagagtttcggcacttcgctctgttataacctccggctttcgcgccgttagtgtgtttgaggtaccgggaagtgtaaggtccacccttggagctactttaaggcccgatcacgccttatatagtacaactatgcaagccacacccaacgcatcgcatattagtgcttttaaccttcgcatagtttccccgtcggcatatcgtgtttgtcctctccaaaatgacacagatacctacttaggtattccagcagacgtggcggcagttcttccagtagacgtggtgactgatcctaacatcttgctgggcatgcagacaacggtacacattgcggagctagtcaaggcatgtcatccgtcacccgatgttgtgagcgctgtaggggagcacctgaactggctcaacaaactcttactcccacttaaggaatcgactcagttgcaaggaagcgagtcgtacaaggagtgccttgcactcttgggtcgtgttcacgctgcgatgaagatggtgagaattggcttagtagtgccccagctgcaatacagaatgtacggtagcctcatcaaccaaatggcccaagtagcacaaaactacgaccgagaattcaagcaattcaaattattcatcatccaaaatcaaatccttggcagctatttgctgcagcagaacagggcatttgctgagagggagctgcagatggagagctttcatgctgctgtcatttctcaaagaagggaggagttggacaatacattcgcaaagatggaccgattgagcgggcaaatggaggcagagagtagtgcaatggagcaagccaaaaaggaaatggacgaaggattgaggcagttccagaataggcaagttgcgaacgccctctttgccgttcttagcgctgtagctcagattgggcttgcattccttacggctggtgcaacggctcctggagctgtggcgtcggcggggcaagctgtgagcatagcaggtcaggcggcgcaaggtctgcgaagggtggtggaaattctagagcagctggaggctgtgatggaggttgtggctgctgtgaaggacctcgtggattcattggaacaggtaggtcagattgtggacgcaccggtgatgccggaattgccctcagaggcggactggtccatttttgtgaacgaggtggaggccgtggcagagggcatgccaacggaagtctcggaggttccggtgtggcacgcccggtgcaagtccgtggctgcactgggtcgggagatgagcatcacggcagtacagatgtcggagctgcagtatgacatctgggtgcaaggcatgatgcgggatatggctcgaagccaggcagacaggctggccgcaattcaacccgcggaccttaccaactatttggagatggctacccagatggatatgcggactacgaggatgctgctggggctcctcaacatattgcgcatccagaatgcggcgctcaggtacgagtatcttctaatgcccacggagctcacaacatggccactgggtatggataccgtgggtgacttgctcatcgcgcaggagaatgctgcactgataggattaatgcagctagggccctcatctgatttcacgagcaggcatgtggtgaaagacatacctgtgaacttgctgctcgatggcgaggattgggagtttgagattcctgtgcaagctggcatgtccagcttcccttccagctggtctcgcgtccgtattcggcacctggagatgcactttgtgaaggaggccagcggtattggtggtgagattatccaccagcctaccacccagactgggaccgtttacatccttctgcagggttccactatcttccatgaccgcagaagagaccaggtgttgccttttcaggccgctgctccgctcaactaccattacgcgtaccgcctcgacaccggcgactccactctcacaaacgaaccctctgaacagtttgccaacaagttcatgcagatgacacccttcacccgttggaggcttcgtctgtctgcgtccgcaaaagagaatgcaggattagcctttcccacggctacagcacttgactccactacccagattgtcatcactttccatgttacggccatcagacaaattgactggcggcacgacgaagag

SEQ ID NO: 301 - DNA, 2601 bp, synthetic construct
  misc_feature 1..2601: note = PtIP-83 polypeptide variant encoding polynucleotide
  source 1..2601: mol_type = other DNA
atggctctcgtggattacggcaagcttttcgaggatctgaaccagataagcatgggtgtactggatcgggtagagttttcagaggtgatggtgatccacaggatgtatgtgaggctagctgatctgaatgtggggcagctcgagggagccgagaaagtgaagcggttgtatgtgtttgcggacgtggtggagctaccagtcgtggaatggcggtggccgccgcaaataccaggatcggtgacggtgatcatattgtgtcgtcttcttcaatggccaactgatgggaggcagtcggacaccgagctccacctgacattcatgaagttgcatgccatacaacgagaggaaaatcggtgggagataaccgcagcagatggcatgaactggggagtttacatacacgcagaggaagtacaggttggcgtgctgacaatgtcatggtcttcggtacttagagtttcggcacttcgctctgttataacctccggctttcgcgccgttagtgtgtttgaggtaccgggaagtgtaaggtccacccttggagctactttaaggcccgatcacgccttatatagtacaactatgcaagccacacccaacgcatcgcatattagtgcttttaaccttcgcatagtttccccgtcggcatatcgtgtttgtcctctccaaaatgacacagatacctacttaggtattccagcagacgtggcggcagttcttccagtagacgtggtgactgatcctaacatcttgctgggcatgcagacaacggtacacattgcggagctagtcaaggcatgtcatccgtcacccgatgttgtgagcgctgtaggggagcacctgaactggctcaacaaactcttactcccacttaaggaatcgactcagttgcaaggaagcgagtcgtacaaggagtgccttgcactcttgggtcgtgttcacgctgcgatgaagatggtgagaattggcttagtagtgccccagctgcaatacagaatgtacggtagcctcatcaaccaaatggcccaagtagcacaaaactacgaccgagaattcaagcaattcaaattattcatcatccaaaatcaaatccttggcagctatttgctgcagcagaacagggcatttgctgagagggagctgcagatggagagctttcatgctgctgtcatttctcaaagaagggaggagttggacaatacattcgcaaagatggaccgattgagcgggcaaatggaggcagagagtagtgcaatggagcaagccaaaaaggaaatggacgaaggattgaggcagttccagaataggcaagttgcgaacgccctctttgccgttcttagcgctgtagctcagattgggcttgcattccttacggctggtgcaacggctcctggagctgtggcgtcggcggggcaagctgtgagcatagcaggtcaggcggcgcaaggtctgcgaagggtggtggaaattctagagcagctggaggctgtgatggaggttgtggctgctgtgaaggacctcgtggattcattggaacaggtaggtcagattgtggacgcaccggtgatgccggaattgccctcagaggcggactggtccatttttgtgaacgaggtggaggccgtggcagagggcatgccaacggaagtctcggaggttccggtgtggcacggcaagtgcaagaatgtggctgcactgggtcgggagatgagcatcacggcagtacagatgtcggagctgcagtatgacatctgggtgcaaggcatgatgcgggatatggctcgaagccaggcagacaggctggccgcaattcaacccgcggaccttaccaactatttggagatggctacccagatggatatgcggactacgaggatgctgctggggctcctcaacatattgcgcatccagaatgcggcgctcaggtacgagtatcttctaatgcccacggagctcacaacatggccactgggtatggataccgtgggtgacttgctcatcgcgcaggagaatgctgcactgataggattaatgcagctagggccctcatctgatttcacgagcaggcatgtggtgaaagacatacctgtgaacttgctgctcgatggcgaggattgggagtttgagattcctgtgcaagctggcatgtccagcttcccttccagctggtctcgcgtccgtattcggcacctggagatgcactttgtgaaggaggccagcggtattggtggtgagattatccaccagcctaccacccagactgggaccgtttacatccttctgcagggttccactatcttccatgaccgcagaagagaccaggtgttgccttttcaggccgctgctccgctcaactaccattacgcgtaccgcctcgacaccggcgactccactctcacaaacgaaccctctgaacagtttgccaacaagttcatgcagatgacacccttcacccgttggaggcttcgtctgtctgcgtccgcaaaagagaatgcaggattagcctttcccacggctacagcacttgactccactacccagattgtcatcactttccatgttacggccatcagacaaattgactggcggcacgacgaagag

SEQ ID NO: 302 - DNA, 2601 bp, synthetic construct
  misc_feature 1..2601: note = PtIP-83 polypeptide variant encoding polynucleotide
  source 1..2601: mol_type = other DNA
atggctctcgtggattacggcaagcttttcgaggatctgaaccagataagcatgggtgtactggatcgggtagagttttcagaggtgatggtgatccacaggatgtatgtgaggctagctgatctgaatgtggggcagctcgagggagccgagaaagtgaagcggttgtatgtgtttgcggacgtggtggagctaccagtcgtggaatggcggtggccgccgcaaataccaggatcggtgacggtgatcatattgtgtcgtcttcttcaatggccaactgatgggaggcagtcggacaccgagctccacctgacattcatgaagttgcatgccatacaacgagaggaaaatcggtgggagataaccgcagcagatggcatgaactggggagtttacatacacgcagaggaagtacaggttggcgtgctgacaatgtcatggtcttcggtacttagagtttcggcacttcgctctgttataacctccggctttcgcgccgttagtgtgtttgaggtaccgggaagtgtaaggtccacccttggagctactttaaggcccgatcacgccttatatagtacaactatgcaagccacacccaacgcatcgcatattagtgcttttaaccttcgcatagtttccccgtcggcatatcgtgtttgtcctctccaaaatgacacagatacctacttaggtattccagcagacgtggcggcagttcttccagtagacgtggtgactgatcctaacatcttgctgggcatgcagacaacggtacacattgcggagctagtcaaggcatgtcatccgtcacccgatgttgtgagcgctgtaggggagcacctgaactggctcaacaaactcttactcccacttaaggaatcgactcagttgcaaggaagcgagtcgtacaaggagtgccttgcactcttgggtcgtgttcacgctgcgatgaagatggtgagaattggcttagtagtgccccagctgcaatacagaatgtacggtagcctcatcaaccaaatggcccaagtagcacaaaactacgaccgagaattcaagcaattcaaattattcatcatccaaaatcaaatccttggcagctatttgctgcagcagaacagggcatttgctgagagggagctgcagatggagagctttcatgctgctgtcatttctcaaagaagggaggagttggacaatacattcgcaaagatggaccgattgagcgggcaaatggaggcagagagtagtgcaatggagcaagccaaaaaggaaatggacgaaggattgaggcagttccagaataggcaagttgcgaacgccctctttgccgttcttagcgctgtagctcagattgggcttgcattccttacggctggtgcaacggctcctggagctgtggcgtcggcggggcaagctgtgagcatagcaggtcaggcggcgcaaggtctgcgaagggtggtggaaattctagagcagctggaggctgtgatggaggttgtggctgctgtgaaggacctcgtggattcattggaacaggtaggtcagattgtggacgcaccggtgatgccggaattgccctcagaggcggactggtccatttttgtgaacgaggtggaggccgtggcagagggcatgccaacggaagtctcggaggttccggtgtggatcgccaagtgcaagtgcgtggctgcactgggtcgggagatgagcatcacggcagtacagatgtcggagctgcagtatgacatctgggtgcaaggcatgatgcgggatatggctcgaagccaggcagacaggctggccgcaattcaacccgcggaccttaccaactatttggagatggctacccagatggatatgcggactacgaggatgctgctggggctcctcaacatattgcgcatccagaatgcggcgctcaggtacgagtatcttctaatgcccacggagctcacaacatggccactgggtatggataccgtgggtgacttgctcatcgcgcaggagaatgctgcactgataggattaatgcagctagggccctcatctgatttcacgagcaggcatgtggtgaaagacatacctgtgaacttgctgctcgatggcgaggattgggagtttgagattcctgtgcaagctggcatgtccagcttcccttccagctggtctcgcgtccgtattcggcacctggagatgcactttgtgaaggaggccagcggtattggtggtgagattatccaccagcctaccacccagactgggaccgtttacatccttctgcagggttccactatcttccatgaccgcagaagagaccaggtgttgccttttcaggccgctgctccgctcaactaccattacgcgtaccgcctcgacaccggcgactccactctcacaaacgaaccctctgaacagtttgccaacaagttcatgcagatgacacccttcacccgttggaggcttcgtctgtctgcgtccgcaaaagagaatgcaggattagcctttcccacggctacagcacttgactccactacccagattgtcatcactttccatgttacggccatcagacaaattgactggcggcacgacgaagag

SEQ ID NO: 303 - DNA, 2601 bp, synthetic construct
  misc_feature 1..2601: note = PtIP-83 polypeptide variant encoding polynucleotide
  source 1..2601: mol_type = other DNA
atggctctcgtggattacggcaagcttttcgaggatctgaaccagataagcatgggtgtactggatcgggtagagttttcagaggtgatggtgatccacaggatgtatgtgaggctagctgatctgaatgtggggcagctcgagggagccgagaaagtgaagcggttgtatgtgtttgcggacgtggtggagctaccagtcgtggaatggcggtggccgccgcaaataccaggatcggtgacggtgatcatattgtgtcgtcttcttcaatggccaactgatgggaggcagtcggacaccgagctccacctgacattcatgaagttgcatgccatacaacgagaggaaaatcggtgggagataaccgcagcagatggcatgaactggggagtttacatacacgcagaggaagtacaggttggcgtgctgacaatgtcatggtcttcggtacttagagtttcggcacttcgctctgttataacctccggctttcgcgccgttagtgtgtttgaggtaccgggaagtgtaaggtccacccttggagctactttaaggcccgatcacgccttatatagtacaactatgcaagccacacccaacgcatcgcatattagtgcttttaaccttcgcatagtttccccgtcggcatatcgtgtttgtcctctccaaaatgacacagatacctacttaggtattccagcagacgtggcggcagttcttccagtagacgtggtgactgatcctaacatcttgctgggcatgcagacaacggtacacattgcggagctagtcaaggcatgtcatccgtcacccgatgttgtgagcgctgtaggggagcacctgaactggctcaacaaactcttactcccacttaaggaatcgactcagttgcaaggaagcgagtcgtacaaggagtgccttgcactcttgggtcgtgttcacgctgcgatgaagatggtgagaattggcttagtagtgccccagctgcaatacagaatgtacggtagcctcatcaaccaaatggcccaagtagcacaaaactacgaccgagaattcaagcaattcaaattattcatcatccaaaatcaaatccttggcagctatttgctgcagcagaacagggcatttgctgagagggagctgcagatggagagctttcatgctgctgtcatttctcaaagaagggaggagttggacaatacattcgcaaagatggaccgattgagcgggcaaatggaggcagagagtagtgcaatggagcaagccaaaaaggaaatggacgaaggattgaggcagttccagaataggcaagttgcgaacgccctctttgccgttcttagcgctgtagctcagattgggcttgcattccttacggctggtgcaacggctcctggagctgtggcgtcggcggggcaagctgtgagcatagcaggtcaggcggcgcaaggtctgcgaagggtggtggaaattctagagcagctggaggctgtgatggaggttgtggctgctgtgaaggacctcgtggattcattggaacaggtaggtcagattgtggacgcaccggtgatgccggaattgccctcagaggcggactggtccatttttgtgaacgaggtggaggccgtggcagagggcatgccaacggaagtctcggaggttccggtgtggatcgccaagtgcaagagcgtggctgcactgggtcgggagatgagcatcacggcagtacagatgtcggagctgcagtatgacatctgggtgcaaggcatgatgcgggatatggctcgaagccaggcagacaggctggccgcaattcaacccgcggaccttaccaactatttggagatggctacccagatggatatgcggactacgaggatgctgctggggctcctcaacatattgcgcatccagaatgcggcgctcaggtacgagtatcttctaatgcccacggagctcacaacatggccactgggtatggataccgtgggtgacttgctcatcgcgcaggagaatgctgcactgataggattaatgcagctagggccctcatctgatttcacgagcaggcatgtggtgaaagacatacctgtgaacttgctgctcgatggcgaggattgggagtttgagattcctgtgcaagctggcatgtccagcttcccttccagctggtctcgcgtccgtattcggcacctggagatgcactttgtgaaggaggccagcggtattggtggtgagattatccaccagcctaccacccagactgggaccgtttacatccttctgcagggttccactatcttccatgaccgcagaagagaccaggtgttgccttttcaggccgctgctccgctcaactaccattacgcgtaccgcctcgacaccggcgactccactctcacaaacgaaccctctgaacagtttgccaacaagttcatgcagatgacacccttcacccgttggaggcttcgtctgtctgcgtccgcaaaagagaatgcaggattagcctttcccacggctacagcacttgactccactacccagattgtcatcactttccatgttacggccatcagacaaattgactggcggcacgacgaagag

SEQ ID NO: 304 - DNA, 2601 bp, synthetic construct
  misc_feature 1..2601: note = PtIP-83 polypeptide variant encoding polynucleotide
  source 1..2601: mol_type = other DNA
atggctctcgtggattacggcaagcttttcgaggatctgaaccagataagcatgggtgtactggatcgggtagagttttcagaggtgatggtgatccacaggatgtatgtgaggctagctgatctgaatgtggggcagctcgagggagccgagaaagtgaagcggttgtatgtgtttgcggacgtggtggagctaccagtcgtggaatggcggtggccgccgcaaataccaggatcggtgacggtgatcatattgtgtcgtcttcttcaatggccaactgatgggaggcagtcggacaccgagctccacctgacattcatgaagttgcatgccatacaacgagaggaaaatcggtgggagataaccgcagcagatggcatgaactggggagtttacatacacgcagaggaagtacaggttggcgtgctgacaatgtcatggtcttcggtacttagagtttcggcacttcgctctgttataacctccggctttcgcgccgttagtgtgtttgaggtaccgggaagtgtaaggtccacccttggagctactttaaggcccgatcacgccttatatagtacaactatgcaagccacacccaacgcatcgcatattagtgcttttaaccttcgcatagtttccccgtcggcatatcgtgtttgtcctctccaaaatgacacagatacctacttaggtattccagcagacgtggcggcagttcttccagtagacgtggtgactgatcctaacatcttgctgggcatgcagacaacggtacacattgcggagctagtcaaggcatgtcatccgtcacccgatgttgtgagcgctgtaggggagcacctgaactggctcaacaaactcttactcccacttaaggaatcgactcagttgcaaggaagcgagtcgtacaaggagtgccttgcactcttgggtcgtgttcacgctgcgatgaagatggtgagaattggcttagtagtgccccagctgcaatacagaatgtacggtagcctcatcaaccaaatggcccaagtagcacaaaactacgaccgagaattcaagcaattcaaattattcatcatccaaaatcaaatccttggcagctatttgctgcagcagaacagggcatttgctgagagggagctgcagatggagagctttcatgctgctgtcatttctcaaagaagggaggagttggacaatacattcgcaaagatggaccgattgagcgggcaaatggaggcagagagtagtgcaatggagcaagccaaaaaggaaatggacgaaggattgaggcagttccagaataggcaagttgcgaacgccctctttgccgttcttagcgctgtagctcagattgggcttgcattccttacggctggtgcaacggctcctggagctgtggcgtcggcggggcaagctgtgagcatagcaggtcaggcggcgcaaggtctgcgaagggtggtggaaattctagagcagctggaggctgtgatggaggttgtggctgctgtgaaggacctcgtggattcattggaacaggtaggtcagattgtggacgcaccggtgatgccggaattgccctcagaggcggactggtccatttttgtgaacgaggtggaggccgtggcagagggcatgccaacggaagtctcggaggttccggtgtggatcggcaagtgcaagaatgtggctgcactgggtcgggagatgagcatcacggcagtacagatgtcggagctgcagtatgacatctgggtgcaaggcatgatgcgggatatggctcgaagccaggcagacaggctggccgcaattcaacccgcggaccttaccaactatttggagatggctacccagatggatatgcggactacgaggatgctgctggggctcctcaacatattgcgcatccagaatgcggcgctcaggtacgagtatcttctaatgcccacggagctcacaacatggccactgggtatggataccgtgggtgacttgctcatcgcgcaggagaatgctgcactgataggattaatgcagctagggccctcatctgatttcacgagcaggcatgtggtgaaagacatacctgtgaacttgctgctcgatggcgaggattgggagtttgagattcctgtgcaagctggcatgtccagcttcccttccagctggtctcgcgtccgtattcggcacctggagatgcactttgtgaaggaggccagcggtattggtggtgagattatccaccagcctaccacccagactgggaccgtttacatccttctgcagggttccactatcttccatgaccgcagaagagaccaggtgttgccttttcaggccgctgctccgctcaactaccattacgcgtaccgcctcgacaccggcgactccactctcacaaacgaaccctctgaacagtttgccaacaagttcatgcagatgacacccttcacccgttggaggcttcgtctgtctgcgtccgcaaaagagaatgcaggattagcctttcccacggctacagcacttgactccactacccagattgtcatcactttccatgttacggccatcagacaaattgactggcggcacgacgaagag

SEQ ID NO: 305 - DNA, 2601 bp, synthetic construct
  misc_feature 1..2601: note = PtIP-83 polypeptide variant encoding polynucleotide
  source 1..2601: mol_type = other DNA
atggctctcgtggattacggcaagcttttcgaggatctgaaccagataagcatgggtgtactggatcgggtagagttttcagaggtgatggtgatccacaggatgtatgtgaggctagctgatctgaatgtggggcagctcgagggagccgagaaagtgaagcggttgtatgtgtttgcggacgtggtggagctaccagtcgtggaatggcggtggccgccgcaaataccaggatcggtgacggtgatcatattgtgtcgtcttcttcaatggccaactgatgggaggcagtcggacaccgagctccacctgacattcatgaagttgcatgccatacaacgagaggaaaatcggtgggagataaccgcagcagatggcatgaactggggagtttacatacacgcagaggaagtacaggttggcgtgctgacaatgtcatggtcttcggtacttagagtttcggcacttcgctctgttataacctccggctttcgcgccgttagtgtgtttgaggtaccgggaagtgtaaggtccacccttggagctactttaaggcccgatcacgccttatatagtacaactatgcaagccacacccaacgcatcgcatattagtgcttttaaccttcgcatagtttccccgtcggcatatcgtgtttgtcctctccaaaatgacacagatacctacttaggtattccagcagacgtggcggcagttcttccagtagacgtggtgactgatcctaacatcttgctgggcatgcagacaacggtacacattgcggagctagtcaaggcatgtcatccgtcacccgatgttgtgagcgctgtaggggagcacctgaactggctcaacaaactcttactcccacttaaggaatcgactcagttgcaaggaagcgagtcgtacaaggagtgccttgcactcttgggtcgtgttcacgctgcgatgaagatggtgagaattggcttagtagtgccccagctgcaatacagaatgtacggtagcctcatcaaccaaatggcccaagtagcacaaaactacgaccgagaattcaagcaattcaaattattcatcatccaaaatcaaatccttggcagctatttgctgcagcagaacagggcatttgctgagagggagctgcagatggagagctttcatgctgctgtcatttctcaaagaagggaggagttggacaatacattcgcaaagatggaccgattgagcgggcaaatggaggcagagagtagtgcaatggagcaagccaaaaaggaaatggacgaaggattgaggcagttccagaataggcaagttgcgaacgccctctttgccgttcttagcgctgtagctcagattgggcttgcattccttacggctggtgcaacggctcctggagctgtggcgtcggcggggcaagctgtgagcatagcaggtcaggcggcgcaaggtctgcgaagggtggtggaaattctagagcagctggaggctgtgatggaggttgtggctgctgtgaaggacctcgtggattcattggaacaggtaggtcagattgtggacgcaccggtgatgccggaattgccctcagaggcggactggtccatttttgtgaacgaggtggaggccgtggcagagggcatgccaacggaagtctcggaggttccggtgtggatcggcaagtgcaagtccgtggctgcactgggtcgggagatgagcatcacggcagtacagatgtcggagctgcagtatgacatctgggtgcaaggcatgatgcgggatatggctcgaagccaggcagacaggctggccgcaattcaacccgcggaccttaccaactatttggagatggctacccagatggatatgcggactacgaggatgctgctggggctcctcaacatattgcgcatccagaatgcggcgctcaggtacgagtatcttctaatgcccacggagctcacaacatggccactgggtatggataccgtgggtgacttgctcatcgcgcaggagaatgctgcactgataggattaatgcagctagggccctcatctgatttcacgagcaggcatgtggtgaaagacatacctgtgaacttgctgctcgatggcgaggattgggagtttgagattcctgtgcaagctggcatgtccagcttcccttccagctggtctcgcgtccgtattcggcacctggagatgcactttgtgaaggaggccagcggtattggtggtgagattatccaccagcctaccacccagactgggaccgtttacatccttctgcagggttccactatcttccatgaccgcagaagagaccaggtgttgccttttcaggccgctgctccgctcaactaccattacgcgtaccgcctcgacaccggcgactccactctcacaaacgaaccctctgaacagtttgccaacaagttcatgcagatgacacccttcacccgttggaggcttcgtctgtctgcgtccgcaaaagagaatgcaggattagcctttcccacggctacagcacttgactccactacccagattgtcatcactttccatgttacggccatcagacaaattgactggcggcacgacgaagag

SEQ ID NO: 306 - DNA, 2601 bp, synthetic construct
  misc_feature 1..2601: note = PtIP-83 polypeptide variant encoding polynucleotide
  source 1..2601: mol_type = other DNA
atggctctcgtggattacggcaagcttttcgaggatctgaaccagataagcatgggtgtactggatcgggtagagttttcagaggtgatggtgatccacaggatgtatgtgaggctagctgatctgaatgtggggcagctcgagggagccgagaaagtgaagcggttgtatgtgtttgcggacgtggtggagctaccagtcgtggaatggcggtggccgccgcaaataccaggatcggtgacggtgatcatattgtgtcgtcttcttcaatggccaactgatgggaggcagtcggacaccgagctccacctgacattcatgaagttgcatgccatacaacgagaggaaaatcggtgggagataaccgcagcagatggcatgaactggggagtttacatacacgcagaggaagtacaggttggcgtgctgacaatgtcatggtcttcggtacttagagtttcggcacttcgctctgttataacctccggctttcgcgccgttagtgtgtttgaggtaccgggaagtgtaaggtccacccttggagctactttaaggcccgatcacgccttatatagtacaactatgcaagccacacccaacgcatcgcatattagtgcttttaaccttcgcatagtttccccgtcggcatatcgtgtttgtcctctccaaaatgacacagatacctacttaggtattccagcagacgtggcggcagttcttccagtagacgtggtgactgatcctaacatcttgctgggcatgcagacaacggtacacattgcggagctagtcaaggcatgtcatccgtcacccgatgttgtgagcgctgtaggggagcacctgaactggctcaacaaactcttactcccacttaaggaatcgactcagttgcaaggaagcgagtcgtacaaggagtgccttgcactcttgggtcgtgttcacgctgcgatgaagatggtgagaattggcttagtagtgccccagctgcaatacagaatgtacggtagcctcatcaaccaaatggcccaagtagcacaaaactacgaccgagaattcaagcaattcaaattattcatcatccaaaatcaaatccttggcagctatttgctgcagcagaacagggcatttgctgagagggagctgcagatggagagctttcatgctgctgtcatttctcaaagaagggaggagttggacaatacattcgcaaagatggaccgattgagcgggcaaatggaggcagagagtagtgcaatggagcaagccaaaaaggaaatggacgaaggattgaggcagttccagaataggcaagttgcgaacgccctctttgccgttcttagcgctgtagctcagattgggcttgcattccttacggctggtgcaacggctcctggagctgtggcgtcggcggggcaagctgtgagcatagcaggtcaggcggcgcaaggtctgcgaagggtggtggaaattctagagcagctggaggctgtgatggaggttgtggctgctgtgaaggacctcgtggattcattggaacaggtaggtcagattgtggacgcaccggtgatgccggaattgccctcagaggcggactggtccatttttgtgaacgaggtggaggccgtggcagagggcatgccaacggaagtctcggaggttccggtgtggatcggcaagtgcaacaatgtggctgcactgggtcgggagatgagcatcacggcagtacagatgtcggagctgcagtatgacatctgggtgcaaggcatgatgcgggatatggctcgaagccaggcagacaggctggccgcaattcaacccgcggaccttaccaactatttggagatggctacccagatggatatgcggactacgaggatgctgctggggctcctcaacatattgcgcatccagaatgcggcgctcaggtacgagtatcttctaatgcccacggagctcacaacatggccactgggtatggataccgtgggtgacttgctcatcgcgcaggagaatgctgcactgataggattaatgcagctagggccctcatctgatttcacgagcaggcatgtggtgaaagacatacctgtgaacttgctgctcgatggcgaggattgggagtttgagattcctgtgcaagctggcatgtccagcttcccttccagctggtctcgcgtccgtattcggcacctggagatgcactttgtgaaggaggccagcggtattggtggtgagattatccaccagcctaccacccagactgggaccgtttacatccttctgcagggttccactatcttccatgaccgcagaagagaccaggtgttgccttttcaggccgctgctccgctcaactaccattacgcgtaccgcctcgacaccggcgactccactctcacaaacgaaccctctgaacagtttgccaacaagttcatgcagatgacacccttcacccgttggaggcttcgtctgtctgcgtccgcaaaagagaatgcaggattagcctttcccacggctacagcacttgactccactacccagattgtcatcactttccatgttacggccatcagacaaattgactggcggcacgacgaagag

SEQ ID NO: 307 - DNA, 2601 bp, synthetic construct
  misc_feature 1..2601: note = PtIP-83 polypeptide variant encoding polynucleotide
  source 1..2601: mol_type = other DNA
atggctctcgtggattacggcaagcttttcgaggatctgaaccagataagcatgggtgtactggatcgggtagagttttcagaggtgatggtgatccacaggatgtatgtgaggctagctgatctgaatgtggggcagctcgagggagccgagaaagtgaagcggttgtatgtgtttgcggacgtggtggagctaccagtcgtggaatggcggtggccgccgcaaataccaggatcggtgacggtgatcatattgtgtcgtcttcttcaatggccaactgatgggaggcagtcggacaccgagctccacctgacattcatgaagttgcatgccatacaacgagaggaaaatcggtgggagataaccgcagcagatggcatgaactggggagtttacatacacgcagaggaagtacaggttggcgtgctgacaatgtcatggtcttcggtacttagagtttcggcacttcgctctgttataacctccggctttcgcgccgttagtgtgtttgaggtaccgggaagtgtaaggtccacccttggagctactttaaggcccgatcacgccttatatagtacaactatgcaagccacacccaacgcatcgcatattagtgcttttaaccttcgcatagtttccccgtcggcatatcgtgtttgtcctctccaaaatgacacagatacctacttaggtattccagcagacgtggcggcagttcttccagtagacgtggtgactgatcctaacatcttgctgggcatgcagacaacggtacacattgcggagctagtcaaggcatgtcatccgtcacccgatgttgtgagcgctgtaggggagcacctgaactggctcaacaaactcttactcccacttaaggaatcgactcagttgcaaggaagcgagtcgtacaaggagtgccttgcactcttgggtcgtgttcacgctgcgatgaagatggtgagaattggcttagtagtgccccagctgcaatacagaatgtacggtagcctcatcaaccaaatggcccaagtagcacaaaactacgaccgagaattcaagcaattcaaattattcatcatccaaaatcaaatccttggcagctatttgctgcagcagaacagggcatttgctgagagggagctgcagatggagagctttcatgctgctgtcatttctcaaagaagggaggagttggacaatacattcgcaaagatggaccgattgagcgggcaaatggaggcagagagtagtgcaatggagcaagccaaaaaggaaatggacgaaggattgaggcagttccagaataggcaagttgcgaacgccctctttgccgttcttagcgctgtagctcagattgggcttgcattccttacggctggtgcaacggctcctggagctgtggcgtcggcggggcaagctgtgagcatagcaggtcaggcggcgcaaggtctgcgaagggtggtggaaattctagagcagctggaggctgtgatggaggttgtggctgctgtgaaggacctcgtggattcattggaacaggtaggtcagattgtggacgcaccggtgatgccggaattgccctcagaggcggactggtccatttttgtgaacgaggtggaggccgtggcagagggcatgccaacggaagtctcggaggttccggtgtggatcgtcaagtgcaagagcgtggctgcactgggtcgggagatgagcatcacggcagtacagatgtcggagctgcagtatgacatctgggtgcaaggcatgatgcgggatatggctcgaagccaggcagacaggctggccgcaattcaacccgcggaccttaccaactatttggagatggctacccagatggatatgcggactacgaggatgctgctggggctcctcaacatattgcgcatccagaatgcggcgctcaggtacgagtatcttctaatgcccacggagctcacaacatggccactgggtatggataccgtgggtgacttgctcatcgcgcaggagaatgctgcactgataggattaatgcagctagggccctcatctgatttcacgagcaggcatgtggtgaaagacatacctgtgaacttgctgctcgatggcgaggattgggagtttgagattcctgtgcaagctggcatgtccagcttcccttccagctggtctcgcgtccgtattcggcacctggagatgcactttgtgaaggaggccagcggtattggtggtgagattatccaccagcctaccacccagactgggaccgtttacatccttctgcagggttccactatcttccatgaccgcagaagagaccaggtgttgccttttcaggccgctgctccgctcaactaccattacgcgtaccgcctcgacaccggcgactccactctcacaaacgaaccctctgaacagtttgccaacaagttcatgcagatgacacccttcacccgttggaggcttcgtctgtctgcgtccgcaaaagagaatgcaggattagcctttcccacggctacagcacttgactccactacccagattgtcatcactttccatgttacggccatcagacaaattgactggcggcacgacgaagag

SEQ ID NO: 308 - DNA, 2601 bp, synthetic construct
  misc_feature 1..2601: note = PtIP-83 polypeptide variant encoding polynucleotide
  source 1..2601: mol_type = other DNA
atggctctcgtggattacggcaagcttttcgaggatctgaaccagataagcatgggtgtactggatcgggtagagttttcagaggtgatggtgatccacaggatgtatgtgaggctagctgatctgaatgtggggcagctcgagggagccgagaaagtgaagcggttgtatgtgtttgcggacgtggtggagctaccagtcgtggaatggcggtggccgccgcaaataccaggatcggtgacggtgatcatattgtgtcgtcttcttcaatggccaactgatgggaggcagtcggacaccgagctccacctgacattcatgaagttgcatgccatacaacgagaggaaaatcggtgggagataaccgcagcagatggcatgaactggggagtttacatacacgcagaggaagtacaggttggcgtgctgacaatgtcatggtcttcggtacttagagtttcggcacttcgctctgttataacctccggctttcgcgccgttagtgtgtttgaggtaccgggaagtgtaaggtccacccttggagctactttaaggcccgatcacgccttatatagtacaactatgcaagccacacccaacgcatcgcatattagtgcttttaaccttcgcatagtttccccgtcggcatatcgtgtttgtcctctccaaaatgacacagatacctacttaggtattccagcagacgtggcggcagttcttccagtagacgtggtgactgatcctaacatcttgctgggcatgcagacaacggtacacattgcggagctagtcaaggcatgtcatccgtcacccgatgttgtgagcgctgtaggggagcacctgaactggctcaacaaactcttactcccacttaaggaatcgactcagttgcaaggaagcgagtcgtacaaggagtgccttgcactcttgggtcgtgttcacgctgcgatgaagatggtgagaattggcttagtagtgccccagctgcaatacagaatgtacggtagcctcatcaaccaaatggcccaagtagcacaaaactacgaccgagaattcaagcaattcaaattattcatcatccaaaatcaaatccttggcagctatttgctgcagcagaacagggcatttgctgagagggagctgcagatggagagctttcatgctgctgtcatttctcaaagaagggaggagttggacaatacattcgcaaagatggaccgattgagcgggcaaatggaggcagagagtagtgcaatggagcaagccaaaaaggaaatggacgaaggattgaggcagttccagaataggcaagttgcgaacgccctctttgccgttcttagcgctgtagctcagattgggcttgcattccttacggctggtgcaacggctcctggagctgtggcgtcggcggggcaagctgtgagcatagcaggtcaggcggcgcaaggtctgcgaagggtggtggaaattctagagcagctggaggctgtgatggaggttgtggctgctgtgaaggacctcgtggattcattggaacaggtaggtcagattgtggacgcaccggtgatgccggaattgccctcagaggcggactggtccatttttgtgaacgaggtggaggccgtggcagagggcatgccaacggaagtctcggaggttccggtgtggctggccaggtgcaagaatgtggctgcactgggtcgggagatgagcatcacggcagtacagatgtcggagctgcagtatgacatctgggtgcaaggcatgatgcgggatatggctcgaagccaggcagacaggctggccgcaattcaacccgcggaccttaccaactatttggagatggctacccagatggatatgcggactacgaggatgctgctggggctcctcaacatattgcgcatccagaatgcggcgctcaggtacgagtatcttctaatgcccacggagctcacaacatggccactgggtatggataccgtgggtgacttgctcatcgcgcaggagaatgctgcactgataggattaatgcagctagggccctcatctgatttcacgagcaggcatgtggtgaaagacatacctgtgaacttgctgctcgatggcgaggattgggagtttgagattcctgtgcaagctggcatgtccagcttcccttccagctggtctcgcgtccgtattcggcacctggagatgcactttgtgaaggaggccagcggtattggtggtgagattatccaccagcctaccacccagactgggaccgtttacatccttctgcagggttccactatcttccatgaccgcagaagagaccaggtgttgccttttcaggccgctgctccgctcaactaccattacgcgtaccgcctcgacaccggcgactccactctcacaaacgaaccctctgaacagtttgccaacaagttcatgcagatgacacccttcacccgttggaggcttcgtctgtctgcgtccgcaaaagagaatgcaggattagcctttcccacggctacagcacttgactccactacccagattgtcatcactttccatgttacggccatcagacaaattgactggcggcacgacgaagag

SEQ ID NO: 309 - DNA, 2601 bp, synthetic construct
  misc_feature 1..2601: note = PtIP-83 polypeptide variant encoding polynucleotide
  source 1..2601: mol_type = other DNA
atggctctcgtggattacggcaagcttttcgaggatctgaaccagataagcatgggtgtactggatcgggtagagttttcagaggtgatggtgatccacaggatgtatgtgaggctagctgatctgaatgtggggcagctcgagggagccgagaaagtgaagcggttgtatgtgtttgcggacgtggtggagctaccagtcgtggaatggcggtggccgccgcaaataccaggatcggtgacggtgatcatattgtgtcgtcttcttcaatggccaactgatgggaggcagtcggacaccgagctccacctgacattcatgaagttgcatgccatacaacgagaggaaaatcggtgggagataaccgcagcagatggcatgaactggggagtttacatacacgcagaggaagtacaggttggcgtgctgacaatgtcatggtcttcggtacttagagtttcggcacttcgctctgttataacctccggctttcgcgccgttagtgtgtttgaggtaccgggaagtgtaaggtccacccttggagctactttaaggcccgatcacgccttatatagtacaactatgcaagccacacccaacgcatcgcatattagtgcttttaaccttcgcatagtttccccgtcggcatatcgtgtttgtcctctccaaaatgacacagatacctacttaggtattccagcagacgtggcggcagttcttccagtagacgtggtgactgatcctaacatcttgctgggcatgcagacaacggtacacattgcggagctagtcaaggcatgtcatccgtcacccgatgttgtgagcgctgtaggggagcacctgaactggctcaacaaactcttactcccacttaaggaatcgactcagttgcaaggaagcgagtcgtacaaggagtgccttgcactcttgggtcgtgttcacgctgcgatgaagatggtgagaattggcttagtagtgccccagctgcaatacagaatgtacggtagcctcatcaaccaaatggcccaagtagcacaaaactacgaccgagaattcaagcaattcaaattattcatcatccaaaatcaaatccttggcagctatttgctgcagcagaacagggcatttgctgagagggagctgcagatggagagctttcatgctgctgtcatttctcaaagaagggaggagttggacaatacattcgcaaagatggaccgattgagcgggcaaatggaggcagagagtagtgcaatggagcaagccaaaaaggaaatggacgaaggattgaggcagttccagaataggcaagttgcgaacgccctctttgccgttcttagcgctgtagctcagattgggcttgcattccttacggctggtgcaacggctcctggagctgtggcgtcggcggggcaagctgtgagcatagcaggtcaggcggcgcaaggtctgcgaagggtggtggaaattctagagcagctggaggctgtgatggaggttgtggctgctgtgaaggacctcgtggattcattggaacaggtaggtcagattgtggacgcaccggtgatgccggaattgccctcagaggcggactggtccatttttgtgaacgaggtggaggccgtggcagagggcatgccaacggaagtctcggaggttccggtgtggctcgccaggtgcaagagcgtggctgcactgggtcgggagatgagcatcacggcagtacagatgtcggagctgcagtatgacatctgggtgcaaggcatgatgcgggatatggctcgaagccaggcagacaggctggccgcaattcaacccgcggaccttaccaactatttggagatggctacccagatggatatgcggactacgaggatgctgctggggctcctcaacatattgcgcatccagaatgcggcgctcaggtacgagtatcttctaatgcccacggagctcacaacatggccactgggtatggataccgtgggtgacttgctcatcgcgcaggagaatgctgcactgataggattaatgcagctagggccctcatctgatttcacgagcaggcatgtggtgaaagacatacctgtgaacttgctgctcgatggcgaggattgggagtttgagattcctgtgcaagctggcatgtccagcttcccttccagctggtctcgcgtccgtattcggcacctggagatgcactttgtgaaggaggccagcggtattggtggtgagattatccaccagcctaccacccagactgggaccgtttacatccttctgcagggttccactatcttccatgaccgcagaagagaccaggtgttgccttttcaggccgctgctccgctcaactaccattacgcgtaccgcctcgacaccggcgactccactctcacaaacgaaccctctgaacagtttgccaacaagttcatgcagatgacacccttcacccgttggaggcttcgtctgtctgcgtccgcaaaagagaatgcaggattagcctttcccacggctacagcacttgactccactacccagattgtcatcactttccatgttacggccatcagacaaattgactggcggcacgacgaagag

SEQ ID NO: 310 - DNA, 2601 bp, synthetic construct
  misc_feature 1..2601: note = PtIP-83 polypeptide variant encoding polynucleotide
  source 1..2601: mol_type = other DNA
atggctctcgtggattacggcaagcttttcgaggatctgaaccagataagcatgggtgtactggatcgggtagagttttcagaggtgatggtgatccacaggatgtatgtgaggctagctgatctgaatgtggggcagctcgagggagccgagaaagtgaagcggttgtatgtgtttgcggacgtggtggagctaccagtcgtggaatggcggtggccgccgcaaataccaggatcggtgacggtgatcatattgtgtcgtcttcttcaatggccaactgatgggaggcagtcggacaccgagctccacctgacattcatgaagttgcatgccatacaacgagaggaaaatcggtgggagataaccgcagcagatggcatgaactggggagtttacatacacgcagaggaagtacaggttggcgtgctgacaatgtcatggtcttcggtacttagagtttcggcacttcgctctgttataacctccggctttcgcgccgttagtgtgtttgaggtaccgggaagtgtaaggtccacccttggagctactttaaggcccgatcacgccttatatagtacaactatgcaagccacacccaacgcatcgcatattagtgcttttaaccttcgcatagtttccccgtcggcatatcgtgtttgtcctctccaaaatgacacagatacctacttaggtattccagcagacgtggcggcagttcttccagtagacgtggtgactgatcctaacatcttgctgggcatgcagacaacggtacacattgcggagctagtcaaggcatgtcatccgtcacccgatgttgtgagcgctgtaggggagcacctgaactggctcaacaaactcttactcccacttaaggaatcgactcagttgcaaggaagcgagtcgtacaaggagtgccttgcactcttgggtcgtgttcacgctgcgatgaagatggtgagaattggcttagtagtgccccagctgcaatacagaatgtacggtagcctcatcaaccaaatggcccaagtagcacaaaactacgaccgagaattcaagcaattcaaattattcatcatccaaaatcaaatccttggcagctatttgctgcagcagaacagggcatttgctgagagggagctgcagatggagagctttcatgctgctgtcatttctcaaagaagggaggagttggacaatacattcgcaaagatggaccgattgagcgggcaaatggaggcagagagtagtgcaatggagcaagccaaaaaggaaatggacgaaggattgaggcagttccagaataggcaagttgcgaacgccctctttgccgttcttagcgctgtagctcagattgggcttgcattccttacggctggtgcaacggctcctggagctgtggcgtcggcggggcaagctgtgagcatagcaggtcaggcggcgcaaggtctgcgaagggtggtggaaattctagagcagctggaggctgtgatggaggttgtggctgctgtgaaggacctcgtggattcattggaacaggtaggtcagattgtggacgcaccggtgatgccggaattgccctcagaggcggactggtccatttttgtgaacgaggtggaggccgtggcagagggcatgccaacggaagtctcggaggttccggtgtggctgggccggtgcaagaatgtggctgcactgggtcgggagatgagcatcacggcagtacagatgtcggagctgcagtatgacatctgggtgcaaggcatgatgcgggatatggctcgaagccaggcagacaggctggccgcaattcaacccgcggaccttaccaactatttggagatggctacccagatggatatgcggactacgaggatgctgctggggctcctcaacatattgcgcatccagaatgcggcgctcaggtacgagtatcttctaatgcccacggagctcacaacatggccactgggtatggataccgtgggtgacttgctcatcgcgcaggagaatgctgcactgataggattaatgcagctagggccctcatctgatttcacgagcaggcatgtggtgaaagacatacctgtgaacttgctgctcgatggcgaggattgggagtttgagattcctgtgcaagctggcatgtccagcttcccttccagctggtctcgcgtccgtattcggcacctggagatgcactttgtgaaggaggccagcggtattggtggtgagattatccaccagcctaccacccagactgggaccgtttacatccttctgcagggttccactatcttccatgaccgcagaagagaccaggtgttgccttttcaggccgctgctccgctcaactaccattacgcgtaccgcctcgacaccggcgactccactctcacaaacgaaccctctgaacagtttgccaacaagttcatgcagatgacacccttcacccgttggaggcttcgtctgtctgcgtccgcaaaagagaatgcaggattagcctttcccacggctacagcacttgactccactacccagattgtcatcactttccatgttacggccatcagacaaattgactggcggcacgacgaagag

SEQ ID NO: 311 - DNA, 2601 bp, synthetic construct
  misc_feature 1..2601: note = PtIP-83 polypeptide variant encoding polynucleotide
  source 1..2601: mol_type = other DNA
atggctctcgtggattacggcaagcttttcgaggatctgaaccagataagcatgggtgtactggatcgggtagagttttcagaggtgatggtgatccacaggatgtatgtgaggctagctgatctgaatgtggggcagctcgagggagccgagaaagtgaagcggttgtatgtgtttgcggacgtggtggagctaccagtcgtggaatggcggtggccgccgcaaataccaggatcggtgacggtgatcatattgtgtcgtcttcttcaatggccaactgatgggaggcagtcggacaccgagctccacctgacattcatgaagttgcatgccatacaacgagaggaaaatcggtgggagataaccgcagcagatggcatgaactggggagtttacatacacgcagaggaagtacaggttggcgtgctgacaatgtcatggtcttcggtacttagagtttcggcacttcgctctgttataacctccggctttcgcgccgttagtgtgtttgaggtaccgggaagtgtaaggtccacccttggagctactttaaggcccgatcacgccttatatagtacaactatgcaagccacacccaacgcatcgcatattagtgcttttaaccttcgcatagtttccccgtcggcatatcgtgtttgtcctctccaaaatgacacagatacctacttaggtattccagcagacgtggcggcagttcttccagtagacgtggtgactgatcctaacatcttgctgggcatgcagacaacggtacacattgcggagctagtcaaggcatgtcatccgtcacccgatgttgtgagcgctgtaggggagcacctgaactggctcaacaaactcttactcccacttaaggaatcgactcagttgcaaggaagcgagtcgtacaaggagtgccttgcactcttgggtcgtgttcacgctgcgatgaagatggtgagaattggcttagtagtgccccagctgcaatacagaatgtacggtagcctcatcaaccaaatggcccaagtagcacaaaactacgaccgagaattcaagcaattcaaattattcatcatccaaaatcaaatccttggcagctatttgctgcagcagaacagggcatttgctgagagggagctgcagatggagagctttcatgctgctgtcatttctcaaagaagggaggagttggacaatacattcgcaaagatggaccgattgagcgggcaaatggaggcagagagtagtgcaatggagcaagccaaaaaggaaatggacgaaggattgaggcagttccagaataggcaagttgcgaacgccctctttgccgttcttagcgctgtagctcagattgggcttgcattccttacggctggtgcaacggctcctggagctgtggcgtcggcggggcaagctgtgagcatagcaggtcaggcggcgcaaggtctgcgaagggtggtggaaattctagagcagctggaggctgtgatggaggttgtggctgctgtgaaggacctcgtggattcattggaacaggtaggtcagattgtggacgcaccggtgatgccggaattgccctcagaggcggactggtccatttttgtgaacgaggtggaggccgtggcagagggcatgccaacggaagtctcggaggttccggtgtggctgggcaggtgcaagagcgtggctgcactgggtcgggagatgagcatcacggcagtacagatgtcggagctgcagtatgacatctgggtgcaaggcatgatgcgggatatggctcgaagccaggcagacaggctggccgcaattcaacccgcggaccttaccaactatttggagatggctacccagatggatatgcggactacgaggatgctgctggggctcctcaacatattgcgcatccagaatgcggcgctcaggtacgagtatcttctaatgcccacggagctcacaacatggccactgggtatggataccgtgggtgacttgctcatcgcgcaggagaatgctgcactgataggattaatgcagctagggccctcatctgatttcacgagcaggcatgtggtgaaagacatacctgtgaacttgctgctcgatggcgaggattgggagtttgagattcctgtgcaagctggcatgtccagcttcccttccagctggtctcgcgtccgtattcggcacctggagatgcactttgtgaaggaggccagcggtattggtggtgagattatccaccagcctaccacccagactgggaccgtttacatccttctgcagggttccactatcttccatgaccgcagaagagaccaggtgttgccttttcaggccgctgctccgctcaactaccattacgcgtaccgcctcgacaccggcgactccactctcacaaacgaaccctctgaacagtttgccaacaagttcatgcagatgacacccttcacccgttggaggcttcgtctgtctgcgtccgcaaaagagaatgcaggattagcctttcccacggctacagcacttgactccactacccagattgtcatcactttccatgttacggccatcagacaaattgactggcggcacgacgaagag

SEQ ID NO: 312 - DNA, 2601 bp, synthetic construct
  misc_feature 1..2601: note = PtIP-83 polypeptide variant encoding polynucleotide
  source 1..2601: mol_type = other DNA
atggctctcgtggattacggcaagcttttcgaggatctgaaccagataagcatgggtgtactggatcgggtagagttttcagaggtgatggtgatccacaggatgtatgtgaggctagctgatctgaatgtggggcagctcgagggagccgagaaagtgaagcggttgtatgtgtttgcggacgtggtggagctaccagtcgtggaatggcggtggccgccgcaaataccaggatcggtgacggtgatcatattgtgtcgtcttcttcaatggccaactgatgggaggcagtcggacaccgagctccacctgacattcatgaagttgcatgccatacaacgagaggaaaatcggtgggagataaccgcagcagatggcatgaactggggagtttacatacacgcagaggaagtacaggttggcgtgctgacaatgtcatggtcttcggtacttagagtttcggcacttcgctctgttataacctccggctttcgcgccgttagtgtgtttgaggtaccgggaagtgtaaggtccacccttggagctactttaaggcccgatcacgccttatatagtacaactatgcaagccacacccaacgcatcgcatattagtgcttttaaccttcgcatagtttccccgtcggcatatcgtgtttgtcctctccaaaatgacacagatacctacttaggtattccagcagacgtggcggcagttcttccagtagacgtggtgactgatcctaacatcttgctgggcatgcagacaacggtacacattgcggagctagtcaaggcatgtcatccgtcacccgatgttgtgagcgctgtaggggagcacctgaactggctcaacaaactcttactcccacttaaggaatcgactcagttgcaaggaagcgagtcgtacaaggagtgccttgcactcttgggtcgtgttcacgctgcgatgaagatggtgagaattggcttagtagtgccccagctgcaatacagaatgtacggtagcctcatcaaccaaatggcccaagtagcacaaaactacgaccgagaattcaagcaattcaaattattcatcatccaaaatcaaatccttggcagctatttgctgcagcagaacagggcatttgctgagagggagctgcagatggagagctttcatgctgctgtcatttctcaaagaagggaggagttggacaatacattcgcaaagatggaccgattgagcgggcaaatggaggcagagagtagtgcaatggagcaagccaaaaaggaaatggacgaaggattgaggcagttccagaataggcaagttgcgaacgccctctttgccgttcttagcgctgtagctcagattgggcttgcattccttacggctggtgcaacggctcctggagctgtggcgtcggcggggcaagctgtgagcatagcaggtcaggcggcgcaaggtctgcgaagggtggtggaaattctagagcagctggaggctgtgatggaggttgtggctgctgtgaaggacctcgtggattcattggaacaggtaggtcagattgtggacgcaccggtgatgccggaattgccctcagaggcggactggtccatttttgtgaacgaggtggaggccgtggcagagggcatgccaacggaagtctcggaggttccggtgtggctggtcaagtgcaagtgcgtggctgcactgggtcgagagatgagcatcacggcagtacagatgtcggagctgcagtatgacatctgggtgcaaggcatgatgcgggatatggctcgaagccaggcagacaggctggccgcaattcaacccgcggaccttaccaactatttggagatggctacccagatggatatgcggactacgaggatgctgctggggctcctcaacatattgcgcatccagaatgcggcgctcaggtacgagtatcttctaatgcccacggagctcacaacatggccactgggtatggataccgtgggtgacttgctcatcgcgcaggagaatgctgcactgataggattaatgcagctagggccctcatctgatttcacgagcaggcatgtggtgaaagacatacctgtgaacttgctgctcgatggcgaggattgggagtttgagattcctgtgcaagctggcatgtccagcttcccttccagctggtctcgcgtccgtattcggcacctggagatgcactttgtgaaggaggccagcggtattggtggtgagattatccaccagcctaccacccagactgggaccgtttacatccttctgcagggttccactatcttccatgaccgcagaagagaccaggtgttgccttttcaggccgctgctccgctcaactaccattacgcgtaccgcctcgacaccggcgactccactctcacaaacgaaccctctgaacagtttgccaacaagttcatgcagatgacacccttcacccgttggaggcttcgtctgtctgcgtccgcaaaagagaatgcaggattagcctttcccacggctacagcacttgactccactacccagattgtcatcactttccatgttacggccatcagacaaattgactggcggcacgacgaagag

SEQ ID NO: 313 - DNA, 2601 bp, synthetic construct
  misc_feature 1..2601: note = PtIP-83 polypeptide variant encoding polynucleotide
  source 1..2601: mol_type = other DNA
atggctctcgtggattacggcaagcttttcgaggatctgaaccagataagcatgggtgtactggatcgggtagagttttcagaggtgatggtgatccacaggatgtatgtgaggctagctgatctgaatgtggggcagctcgagggagccgagaaagtgaagcggttgtatgtgtttgcggacgtggtggagctaccagtcgtggaatggcggtggccgccgcaaataccaggatcggtgacggtgatcatattgtgtcgtcttcttcaatggccaactgatgggaggcagtcggacaccgagctccacctgacattcatgaagttgcatgccatacaacgagaggaaaatcggtgggagataaccgcagcagatggcatgaactggggagtttacatacacgcagaggaagtacaggttggcgtgctgacaatgtcatggtcttcggtacttagagtttcggcacttcgctctgttataacctccggctttcgcgccgttagtgtgtttgaggtaccgggaagtgtaaggtccacccttggagctactttaaggcccgatcacgccttatatagtacaactatgcaagccacacccaacgcatcgcatattagtgcttttaaccttcgcatagtttccccgtcggcatatcgtgtttgtcctctccaaaatgacacagatacctacttaggtattccagcagacgtggcggcagttcttccagtagacgtggtgactgatcctaacatcttgctgggcatgcagacaacggtacacattgcggagctagtcaaggcatgtcatccgtcacccgatgttgtgagcgctgtaggggagcacctgaactggctcaacaaactcttactcccacttaaggaatcgactcagttgcaaggaagcgagtcgtacaaggagtgccttgcactcttgggtcgtgttcacgctgcgatgaagatggtgagaattggcttagtagtgccccagctgcaatacagaatgtacggtagcctcatcaaccaaatggcccaagtagcacaaaactacgaccgagaattcaagcaattcaaattattcatcatccaaaatcaaatccttggcagctatttgctgcagcagaacagggcatttgctgagagggagctgcagatggagagctttcatgctgctgtcatttctcaaagaagggaggagttggacaatacattcgcaaagatggaccgattgagcgggcaaatggaggcagagagtagtgcaatggagcaagccaaaaaggaaatggacgaaggattgaggcagttccagaataggcaagttgcgaacgccctctttgccgttcttagcgctgtagctcagattgggcttgcattccttacggctggtgcaacggctcctggagctgtggcgtcggcggggcaagctgtgagcatagcaggtcaggcggcgcaaggtctgcgaagggtggtggaaattctagagcagctggaggctgtgatggaggttgtgtctgctgtgaaggacctcgtggattcattggaacaggtaggtcagattgtggacgcaccggtgatgccggaattgccctcagaggcggactggtccatttttgtgaacgaggtggaggccgtggcagagggcatgccaacggaagtctcggaggttccggtgtggatggccaagtgcaagaatgtggctgcactgggtcgggagatgagcatcacggcagtacagatgtcggagctgcagtatgacatctgggtgcaaggcatgatgcgggatatggctcgaagccaggcagacaggctggccgcaattcaacccgcggaccttaccaactatttggagatggctacccagatggatatgcggactacgaggatgctgctggggctcctcaacatattgcgcatccagaatgcggcgctcaggtacgagtatcttctaatgcccacggagctcacaacatggccactgggtatggataccgtgggtgacttgctcatcgcgcaggagaatgctgcactgataggattaatgcagctagggccctcatctgatttcacgagcaggcatgtggtgaaagacatacctgtgaacttgctgctcgatggcgaggattgggagtttgagattcctgtgcaagctggcatgtccagcttcccttccagctggtctcgcgtccgtattcggcacctggagatgcactttgtgaaggaggccagcggtattggtggtgagattatccaccagcctaccacccagactgggaccgtttacatccttctgcagggttccactatcttccatgaccgcagaagagaccaggtgttgccttttcaggccgctgctccgctcaactaccattacgcgtaccgcctcgacaccggcgactccactctcacaaacgaaccctctgaacagtttgccaacaagttcatgcagatgacacccttcacccgttggaggcttcgtctgtctgcgtccgcaaaagagaatgcaggattagcctttcccacggctacagcacttgactccactacccagattgtcatcactttccatgttacggccatcagacaaattgactggcggcacgacgaagag

SEQ ID NO: 314 - DNA, 2601 bp, synthetic construct
  misc_feature 1..2601: note = PtIP-83 polypeptide variant encoding polynucleotide
  source 1..2601: mol_type = other DNA
atggctctcgtggattacggcaagcttttcgaggatctgaaccagataagcatgggtgtactggatcgggtagagttttcagaggtgatggtgatccacaggatgtatgtgaggctagctgatctgaatgtggggcagctcgagggagccgagaaagtgaagcggttgtatgtgtttgcggacgtggtggagctaccagtcgtggaatggcggtggccgccgcaaataccaggatcggtgacggtgatcatattgtgtcgtcttcttcaatggccaactgatgggaggcagtcggacaccgagctccacctgacattcatgaagttgcatgccatacaacgagaggaaaatcggtgggagataaccgcagcagatggcatgaactggggagtttacatacacgcagaggaagtacaggttggcgtgctgacaatgtcatggtcttcggtacttagagtttcggcacttcgctctgttataacctccggctttcgcgccgttagtgtgtttgaggtaccgggaagtgtaaggtccacccttggagctactttaaggcccgatcacgccttatatagtacaactatgcaagccacacccaacgcatcgcatattagtgcttttaaccttcgcatagtttccccgtcggcatatcgtgtttgtcctctccaaaatgacacagatacctacttaggtattccagcagacgtggcggcagttcttccagtagacgtggtgactgatcctaacatcttgctgggcatgcagacaacggtacacattgcggagctagtcaaggcatgtcatccgtcacccgatgttgtgagcgctgtaggggagcacctgaactggctcaacaaactcttactcccacttaaggaatcgactcagttgcaaggaagcgagtcgtacaaggagtgccttgcactcttgggtcgtgttcacgctgcgatgaagatggtgagaattggcttagtagtgccccagctgcaatacagaatgtacggtagcctcatcaaccaaatggcccaagtagcacaaaactacgaccgagaattcaagcaattcaaattattcatcatccaaaatcaaatccttggcagctatttgctgcagcagaacagggcatttgctgagagggagctgcagatggagagctttcatgctgctgtcatttctcaaagaagggaggagttggacaatacattcgcaaagatggaccgattgagcgggcaaatggaggcagagagtagtgcaatggagcaagccaaaaaggaaatggacgaaggattgaggcagttccagaataggcaagttgcgaacgccctctttgccgttcttagcgctgtagctcagattgggcttgcattccttacggctggtgcaacggctcctggagctgtggcgtcggcggggcaagctgtgagcatagcaggtcaggcggcgcaaggtctgcgaagggtggtggaaattctagagcagctggaggctgtgatggaggttgtggctgctgtgaaggacctcgtggattcattggaacaggtaggtcagattgtggacgcaccggtgatgccggaattgccctcagaggcggactggtccatttttgtgaacgaggtggaggccgtggcagagggcatgccaacggaagtctcggaggttccggtgtggatgggccggtgcaagtccgtggctgcactgggtcgggagatgagcatcacggcagtacagatgtcggagctgcagtatgacatctgggtgcaaggcatgatgcgggatatggctcgaagccaggcagacaggctggccgcaattcaacccgcggaccttaccaactatttggagatggctacccagatggatatgcggactacgaggatgctgctggggctcctcaacatattgcgcatccagaatgcggcgctcaggtacgagtatcttctaatgcccacggagctcacaacatggccactgggtatggataccgtgggtgacttgctcatcgcgcaggagaatgctgcactgataggattaatgcagctagggccctcatctgatttcacgagcaggcatgtggtgaaagacatacctgtgaacttgctgctcgatggcgaggattgggagtttgagattcctgtgcaagctggcatgtccagcttcccttccagctggtctcgcgtccgtattcggcacctggagatgcactttgtgaaggaggccagcggtattggtggtgagattatccaccagcctaccacccagactgggaccgtttacatccttctgcagggttccactatcttccatgaccgcagaagagaccaggtgttgccttttcaggccgctgctccgctcaactaccattacgcgtaccgcctcgacaccggcgactccactctcacaaacgaaccctctgaacagtttgccaacaagttcatgcagatgacacccttcacccgttggaggcttcgtctgtctgcgtccgcaaaagagaatgcaggattagcctttcccacggctacagcacttgactccactacccagattgtcatcactttccatgttacggccatcagacaaattgactggcggcacgacgaagag

SEQ ID NO: 315 - DNA, 2601 bp, synthetic construct
  misc_feature 1..2601: note = PtIP-83 polypeptide variant encoding polynucleotide
  source 1..2601: mol_type = other DNA
atggctctcgtggattacggcaagcttttcgaggatctgaaccagataagcatgggtgtactggatcgggtagagttttcagaggtgatggtgatccacaggatgtatgtgaggctagctgatctgaatgtggggcagctcgagggagccgagaaagtgaagcggttgtatgtgtttgcggacgtggtggagctaccagtcgtggaatggcggtggccgccgcaaataccaggatcggtgacggtgatcatattgtgtcgtcttcttcaatggccaactgatgggaggcagtcggacaccgagctccacctgacattcatgaagttgcatgccatacaacgagaggaaaatcggtgggagataaccgcagcagatggcatgaactggggagtttacatacacgcagaggaagtacaggttggcgtgctgacaatgtcatggtcttcggtacttagagtttcggcacttcgctctgttataacctccggctttcgcgccgttagtgtgtttgaggtaccgggaagtgtaaggtccacccttggagctactttaaggcccgatcacgccttatatagtacaactatgcaagccacacccaacgcatcgcatattagtgcttttaaccttcgcatagtttccccgtcggcatatcgtgtttgtcctctccaaaatgacacagatacctacttaggtattccagcagacgtggcggcagttcttccagtagacgtggtgactgatcctaacatcttgctgggcatgcagacaacggtacacattgcggagctagtcaaggcatgtcatccgtcacccgatgttgtgagcgctgtaggggagcacctgaactggctcaacaaactcttactcccacttaaggaatcgactcagttgcaaggaagcgagtcgtacaaggagtgccttgcactcttgggtcgtgttcacgctgcgatgaagatggtgagaattggcttagtagtgccccagctgcaatacagaatgtacggtagcctcatcaaccaaatggcccaagtagcacaaaactacgaccgagaattcaagcaattcaaattattcatcatccaaaatcaaatccttggcagctatttgctgcagcagaacagggcatttgctgagagggagctgcagatggagagctttcatgctgctgtcatttctcaaagaagggaggagttggacaatacattcgcaaagatggaccgattgagcgggcaaatggaggcagagagtagtgcaatggagcaagccaaaaaggaaatggacgaaggattgaggcagttccagaataggcaagttgcgaacgccctctttgccgttcttagcgctgtagctcagattgggcttgcattccttacggctggtgcaacggctcctggagctgtggcgtcggcggggcaagctgtgagcatagcaggtcaggcggcgcaaggtctgcgaagggtggtggaaattctagagcagctggaggctgtgatggaggttgtggctgctgtgaaggacctcgtggattcattggaacaggtaggtcagattgtggacgcaccggtgatgccggaattgccctcagaggcggactggtccatttttgtgaacgaggtggaggccgtggcagagggcatgccaacggaagtctcggaggttccggtgtggatggtcaagtgcaagaatgtggctgcactgggtcgggagatgagcatcacggcagtacagatgtcggagctgcagtatgacatctgggtgcaaggcatgatgcgggatatggctcgaagccaggcagacaggctggccgcaattcaacccgcggaccttaccaactatttggagatggctacccagatggatatgcggactacgaggatgctgctggggctcctcaacatattgcgcatccagaatgcggcgctcaggtacgagtatcttctaatgcccacggagctcacaacatggccactgggtatggataccgtgggtgacttgctcatcgcgcaggagaatgctgcactgataggattaatgcagctagggccctcatctgatttcacgagcaggcatgtggtgaaagacatacctgtgaacttgctgctcgatggcgaggattgggagtttgagattcctgtgcaagctggcatgtccagcttcccttccagctggtctcgcgtccgtattcggcacctggagatgcactttgtgaaggaggccagcggtattggtggtgagattatccaccagcctaccacccagactgggaccgtttacatccttctgcagggttccactatcttccatgaccgcagaagagaccaggtgttgccttttcaggccgctgctccgctcaactaccattacgcgtaccgcctcgacaccggcgactccactctcacaaacgaaccctctgaacagtttgccaacaagttcatgcagatgacacccttcacccgttggaggcttcgtctgtctgcgtccgcaaaagagaatgcaggattagcctttcccacggctacagcacttgactccactacccagattgtcatcactttccatgttacggccatcagacaaattgactggcggcacgacgaagag

SEQ ID NO: 316 - DNA, 2601 bp, synthetic construct
  misc_feature 1..2601: note = PtIP-83 polypeptide variant encoding polynucleotide
  source 1..2601: mol_type = other DNA
atggctctcgtggattacggcaagcttttcgaggatctgaaccagataagcatgggtgtactggatcgggtagagttttcagaggtgatggtgatccacaggatgtatgtgaggctagctgatctgaatgtggggcagctcgagggagccgagaaagtgaagcggttgtatgtgtttgcggacgtggtggagctaccagtcgtggaatggcggtggccgccgcaaataccaggatcggtgacggtgatcatattgtgtcgtcttcttcaatggccaactgatgggaggcagtcggacaccgagctccacctgacattcatgaagttgcatgccatacaacgagaggaaaatcggtgggagataaccgcagcagatggcatgaactggggagtttacatacacgcagaggaagtacaggttggcgtgctgacaatgtcatggtcttcggtacttagagtttcggcacttcgctctgttataacctccggctttcgcgccgttagtgtgtttgaggtaccgggaagtgtaaggtccacccttggagctactttaaggcccgatcacgccttatatagtacaactatgcaagccacacccaacgcatcgcatattagtgcttttaaccttcgcatagtttccccgtcggcatatcgtgtttgtcctctccaaaatgacacagatacctacttaggtattccagcagacgtggcggcagttcttccagtagacgtggtgactgatcctaacatcttgctgggcatgcagacaacggtacacattgcggagctagtcaaggcatgtcatccgtcacccgatgttgtgagcgctgtaggggagcacctgaactggctcaacaaactcttactcccacttaaggaatcgactcagttgcaaggaagcgagtcgtacaaggagtgccttgcactcttgggtcgtgttcacgctgcgatgaagatggtgagaattggcttagtagtgccccagctgcaatacagaatgtacggtagcctcatcaaccaaatggcccaagtagcacaaaactacgaccgagaattcaagcaattcaaattattcatcatccaaaatcaaatccttggcagctatttgctgcagcagaacagggcatttgctgagagggagctgcagatggagagctttcatgctgctgtcatttctcaaagaagggaggagttggacaatacattcgcaaagatggaccgattgagcgggcaaatggaggcagagagtagtgcaatggagcaagccaaaaaggaaatggacgaaggattgaggcagttccagaataggcaagttgcgaacgccctctttgccgttcttagcgctgtagctcagattgggcttgcattccttacggctggtgcaacggctcctggagctgtggcgtcggcggggcaagctgtgagcatagcaggtcaggcggcgcaaggtctgcgaagggtggtggaaattctagagcagctggaggctgtgatggaggttgtggctgctgtgaaggacctcgtggattcattggaacaggtaggtcagattgtggacgcaccggtgatgccggaattgccctcagaggcggactggtccatttttgtgaacgaggtggaggccgtggcagagggcatgccaacggaagtctcggaggttccggtgtggatggtcaagtgcaagagcgtggctgcactgggtcgggagatgagcatcacggcagtacagatgtcggagctgcagtatgacatctgggtgcaaggcatgatgcgggatatggctcgaagccaggcagacaggctggccgcaattcaacccgcggaccttaccaactatttggagatggctacccagatggatatgcggactacgaggatgctgctggggctcctcaacatattgcgcatccagaatgcggcgctcaggtacgagtatcttctaatgcccacggagctcacaacatggccactgggtatggataccgtgggtgacttgctcatcgcgcaggagaatgctgcactgataggattaatgcagctagggccctcatctgatttcacgagcaggcatgtggtgaaagacatacctgtgaacttgctgctcgatggcgaggattgggagtttgagattcctgtgcaagctggcatgtccagcttcccttccagctggtctcgcgtccgtattcggcacctggagatgcactttgtgaaggaggccagcggtattggtggtgagattatccaccagcctaccacccagactgggaccgtttacatccttctgcagggttccactatcttccatgaccgcagaagagaccaggtgttgccttttcaggccgctgctccgctcaactaccattacgcgtaccgcctcgacaccggcgactccactctcacaaacgaaccctctgaacagtttgccaacaagttcatgcagatgacacccttcacccgttggaggcttcgtctgtctgcgtccgcaaaagagaatgcaggattagcctttcccacggctacagcacttgactccactacccagattgtcatcactttccatgttacggccatcagacaaattgactggcggcacgacgaagag

SEQ ID NO: 317 - DNA, 2601 bp, synthetic construct
  misc_feature 1..2601: note = PtIP-83 polypeptide variant encoding polynucleotide
  source 1..2601: mol_type = other DNA
atggctctcgtggattacggcaagcttttcgaggatctgaaccagataagcatgggtgtactggatcgggtagagttttcagaggtgatggtgatccacaggatgtatgtgaggctagctgatctgaatgtggggcagctcgagggagccgagaaagtgaagcggttgtatgtgtttgcggacgtggtggagctaccagtcgtggaatggcggtggccgccgcaaataccaggatcggtgacggtgatcatattgtgtcgtcttcttcaatggccaactgatgggaggcagtcggacaccgagctccacctgacattcatgaagttgcatgccatacaacgagaggaaaatcggtgggagataaccgcagcagatggcatgaactggggagtttacatacacgcagaggaagtacaggttggcgtgctgacaatgtcatggtcttcggtacttagagtttcggcacttcgctctgttataacctccggctttcgcgccgttagtgtgtttgaggtaccgggaagtgtaaggtccacccttggagctactttaaggcccgatcacgccttatatagtacaactatgcaagccacacccaacgcatcgcatattagtgcttttaaccttcgcatagtttccccgtcggcatatcgtgtttgtcctctccaaaatgacacagatacctacttaggtattccagcagacgtggcggcagttcttccagtagacgtggtgactgatcctaacatcttgctgggcatgcagacaacggtacacattgcggagctagtcaaggcatgtcatccgtcacccgatgttgtgagcgctgtaggggagcacctgaactggctcaacaaactcttactcccacttaaggaatcgactcagttgcaaggaagcgagtcgtacaaggagtgccttgcactcttgggtcgtgttcacgctgcgatgaagatggtgagaattggcttagtagtgccccagctgcaatacagaatgtacggtagcctcatcaaccaaatggcccaagtagcacaaaactacgaccgagaattcaagcaattcaaattattcatcatccaaaatcaaatccttggcagctatttgctgcagcagaacagggcatttgctgagagggagctgcagatggagagctttcatgctgctgtcatttctcaaagaagggaggagttggacaatacattcgcaaagatggaccgattgagcgggcaaatggaggcagagagtagtgcaatggagcaagccaaaaaggaaatggacgaaggattgaggcagttccagaataggcaagttgcgaacgccctctttgccgttcttagcgctgtagctcagattgggcttgcattccttacggctggtgcaacggctcctggagctgtggcgtcggcggggcaagctgtgagcatagcaggtcaggcggcgcaaggtctgcgaagggtggtggaaattctagagcagctggaggctgtgatggaggttgtggctgctgtgaaggacctcgtggattcattggaacaggtaggtcagattgtggacgcaccggtgatgccggaattgccctcagaggcggactggtccatttttgtgaacgaggtggaggccgtggcagagggcatgccaacggaagtctcggaggttccggtgtggatggtcaggtgcaagaatgtggctgcactgggtcgggagatgagcatcacggcagtacagatgtcggagctgcagtatgacatctgggtgcaaggcatgatgcgggatatggctcgaagccaggcagacaggctggccgcaattcaacccgcggaccttaccaactatttggagatggctacccagatggatatgcggactacgaggatgctgctggggctcctcaacatattgcgcatccagaatgcggcgctcaggtacgagtatcttctaatgcccacggagctcacaacatggccactgggtatggataccgtgggtgacttgctcatcgcgcaggagaatgctgcactgataggattaatgcagctagggccctcatctgatttcacgagcaggcatgtggtgaaagacatacctgtgaacttgctgctcgatggcgaggattgggagtttgagattcctgtgcaagctggcatgtccagcttcccttccagctggtctcgcgtccgtattcggcacctggagatgcactttgtgaaggaggccagcggtattggtggtgagattatccaccagcctaccacccagactgggaccgtttacatccttctgcagggttccactatcttccatgaccgcagaagagaccaggtgttgccttttcaggccgctgctccgctcaactaccattacgcgtaccgcctcgacaccggcgactccactctcacaaacgaaccctctgaacagtttgccaacaagttcatgcagatgacacccttcacccgttggaggcttcgtctgtctgcgtccgcaaaagagaatgcaggattagcctttcccacggctacagcacttgactccactacccagattgtcatcactttccatgttacggccatcagacaaattgactggcggcacgacgaagag

SEQ ID NO: 318 - DNA, 2601 bp, synthetic construct
  misc_feature 1..2601: note = PtIP-83 polypeptide variant encoding polynucleotide
  source 1..2601: mol_type = other DNA
atggctctcgtggattacggcaagcttttcgaggatctgaaccagataagcatgggtgtactggatcgggtagagttttcagaggtgatggtgatccacaggatgtatgtgaggctagctgatctgaatgtggggcagctcgagggagccgagaaagtgaagcggttgtatgtgtttgcggacgtggtggagctaccagtcgtggaatggcggtggccgccgcaaataccaggatcggtgacggtgatcatattgtgtcgtcttcttcaatggccaactgatgggaggcagtcggacaccgagctccacctgacattcatgaagttgcatgccatacaacgagaggaaaatcggtgggagataaccgcagcagatggcatgaactggggagtttacatacacgcagaggaagtacaggttggcgtgctgacaatgtcatggtcttcggtacttagagtttcggcacttcgctctgttataacctccggctttcgcgccgttagtgtgtttgaggtaccgggaagtgtaaggtccacccttggagctactttaaggcccgatcacgccttatatagtacaactatgcaagccacacccaacgcatcgcatattagtgcttttaaccttcgcatagtttccccgtcggcatatcgtgtttgtcctctccaaaatgacacagatacctacttaggtattccagcagacgtggcggcagttcttccagtagacgtggtgactgatcctaacatcttgctgggcatgcagacaacggtacacattgcggagctagtcaaggcatgtcatccgtcacccgatgttgtgagcgctgtaggggagcacctgaactggctcaacaaactcttactcccacttaaggaatcgactcagttgcaaggaagcgagtcgtacaaggagtgccttgcactcttgggtcgtgttcacgctgcgatgaagatggtgagaattggcttagtagtgccccagctgcaatacagaatgtacggtagcctcatcaaccaaatggcccaagtagcacaaaactacgaccgagaattcaagcaattcaaattattcatcatccaaaatcaaatccttggcagctatttgctgcagcagaacagggcatttgctgagagggagctgcagatggagagctttcatgctgctgtcatttctcaaagaagggaggagttggacaatacattcgcaaagatggaccgattgagcgggcaaatggaggcagagagtagtgcaatggagcaagccaaaaaggaaatggacgaaggattgaggcagttccagaataggcaagttgcgaacgccctctttgccgttcttagcgctgtagctcagattgggcttgcattccttacggctggtgcaacggctcctggagctgtggcgtcggcggggcaagctgtgagcatagcaggtcaggcggcgcaaggtctgcgaagggtggtggaaattctagagcagctggaggctgtgatggaggttgtggctgctgtgaaggacctcgtggattcattggaacaggtaggtcagattgtggacgcaccggtgatgccggaattgccctcagaggcggactggtccatttttgtgaacgaggtggaggccgtggcagagggcatgccaacggaagtctcggaggttccggtgtggcaggccaggtgcaagcatgtggctgcactgggtcgggagatgagcatcacggcagtacagatgtcggagctgcagtatgacatctgggtgcaaggcatgatgcgggatatggctcgaagccaggcagacaggctggccgcaattcaacccgcggaccttaccaactatttggagatggctacccagatggatatgcggactacgaggatgctgctggggctcctcaacatattgcgcatccagaatgcggcgctcaggtacgagtatcttctaatgcccacggagctcacaacatggccactgggtatggataccgtgggtgacttgctcatcgcgcaggagaatgctgcactgataggattaatgcagctagggccctcatctgatttcacgagcaggcatgtggtgaaagacatacctgtgaacttgctgctcgatggcgaggattgggagtttgagattcctgtgcaagctggcatgtccagcttcccttccagctggtctcgcgtccgtattcggcacctggagatgcactttgtgaaggaggccagcggtattggtggtgagattatccaccagcctaccacccagactgggaccgtttacatccttctgcagggttccactatcttccatgaccgcagaagagaccaggtgttgccttttcaggccgctgctccgctcaactaccattacgcgtaccgcctcgacaccggcgactccactctcacaaacgaaccctctgaacagtttgccaacaagttcatgcagatgacacccttcacccgttggaggcttcgtctgtctgcgtccgcaaaagagaatgcaggattagcctttcccacggctacagcacttgactccactacccagattgtcatcactttccatgttacggccatcagacaaattgactggcggcacgacgaagag

SEQ ID NO: 319 - DNA, 2601 bp, synthetic construct
  misc_feature 1..2601: note = PtIP-83 polypeptide variant encoding polynucleotide
  source 1..2601: mol_type = other DNA
atggctctcgtggattacggcaagcttttcgaggatctgaaccagataagcatgggtgtactggatcgggtagagttttcagaggtgatggtgatccacaggatgtatgtgaggctagctgatctgaatgtggggcagctcgagggagccgagaaagtgaagcggttgtatgtgtttgcggacgtggtggagctaccagtcgtggaatggcggtggccgccgcaaataccaggatcggtgacggtgatcatattgtgtcgtcttcttcaatggccaactgatgggaggcagtcggacaccgagctccacctgacattcatgaagttgcatgccatacaacgagaggaaaatcggtgggagataaccgcagcagatggcatgaactggggagtttacatacacgcagaggaagtacaggttggcgtgctgacaatgtcatggtcttcggtacttagagtttcggcacttcgctctgttataacctccggctttcgcgccgttagtgtgtttgaggtaccgggaagtgtaaggtccacccttggagctactttaaggcccgatcacgccttatatagtacaactatgcaagccacacccaacgcatcgcatattagtgcttttaaccttcgcatagtttccccgtcggcatatcgtgtttgtcctctccaaaatgacacagatacctacttaggtattccagcagacgtggcggcagttcttccagtagacgtggtgactgatcctaacatcttgctgggcatgcagacaacggtacacattgcggagctagtcaaggcatgtcatccgtcacccgatgttgtgagcgctgtaggggagcacctgaactggctcaacaaactcttactcccacttaaggaatcgactcagttgcaaggaagcgagtcgtacaaggagtgccttgcactcttgggtcgtgttcacgctgcgatgaagatggtgagaattggcttagtagtgccccagctgcaatacagaatgtacggtagcctcatcaaccaaatggcccaagtagcacaaaactacgaccgagaattcaagcaattcaaattattcatcatccaaaatcaaatccttggcagctatttgctgcagcagaacagggcatttgctgagagggagctgcagatggagagctttcatgctgctgtcatttctcaaagaagggaggagttggacaatacattcgcaaagatggaccgattgagcgggcaaatggaggcagagagtagtgcaatggagcaagccaaaaaggaaatggacgaaggattgaggcagttccagaataggcaagttgcgaacgccctctttgccgttcttagcgctgtagctcagattgggcttgcattccttacggctggtgcaacggctcctggagctgtggcgtcggcggggcaagctgtgagcatagcaggtcaggcggcgcaaggtctgcgaagggtggtggaaattctagagcagctggaggctgtgatggaggttgtggctgctgtgaatgacctcgtggattcattggaacaggtaggtcagattgtggacgcaccggtgatgccggaattgccctcagaggcggactggtccatttttgtgaacgaggtggaggccgtggcagagggcatgccaacggaagtctcggaggttccggtgtggcaggccaggtgcaagaatgtggctgcactgggtcgggagatgagcatcacggcagtacagatgtcggagctgcagtatgacatctgggtgcaaggcatgatgcgggatatggctcgaagccaggcagacaggctggccgcaattcaacccgcggaccttaccaactatttggagatggctacccagatggatatgcggactacgaggatgctgctggggctcctcaacatattgcgcatccagaatgcggcgctcaggtacgagtatcttctaatgcccacggagctcacaacatggccactgggtatggataccgtgggtgacttgctcatcgcgcaggagaatgctgcactgataggattaatgcagctagggccctcatctgatttcacgagcaggcatgtggtgaaagacatacctgtgaacttgctgctcgatggcgaggattgggagtttgagattcctgtgcaagctggcatgtccagcttcccttccagctggtctcgcgtccgtattcggcacctggagatgcactttgtgaaggaggccagcggtattggtggtgagattatccaccagcctaccacccagactgggaccgtttacatccttctgcagggttccactatcttccatgaccgcagaagagaccaggtgttgccttttcaggccgctgctccgctcaactaccattacgcgtaccgcctcgacaccggcgactccactctcacaaacgaaccctctgaacagtttgccaacaagttcatgcagatgacacccttcacccgttggaggcttcgtctgtctgcgtccgcaaaagagaatgcaggattagcctttcccacggctacagcacttgactccactacccagattgtcatcactttccatgttacggccatcagacaaattgactggcggcacgacgaagag

SEQ ID NO: 320 - DNA, 2601 bp, synthetic construct
  misc_feature 1..2601: note = PtIP-83 polypeptide variant encoding polynucleotide
  source 1..2601: mol_type = other DNA
atggctctcgtggattacggcaagcttttcgaggatctgaaccagataagcatgggtgtactggatcgggtagagttttcagaggtgatggtgatccacaggatgtatgtgaggctagctgatctgaatgtggggcagctcgagggagccgagaaagtgaagcggttgtatgtgtttgcggacgtggtggagctaccagtcgtggaatggcggtggccgccgcaaataccaggatcggtgacggtgatcatattgtgtcgtcttcttcaatggccaactgatgggaggcagtcggacaccgagctccacctgacattcatgaagttgcatgccatacaacgagaggaaaatcggtgggagataaccgcagcagatggcatgaactggggagtttacatacacgcagaggaagtacaggttggcgtgctgacaatgtcatggtcttcggtacttagagtttcggcacttcgctctgttataacctccggctttcgcgccgttagtgtgtttgaggtaccgggaagtgtaaggtccacccttggagctactttaaggcccgatcacgccttatatagtacaactatgcaagccacacccaacgcatcgcatattagtgcttttaaccttcgcatagtttccccgtcggcatatcgtgtttgtcctctccaaaatgacacagatacctacttaggtattccagcagacgtggcggcagttcttccagtagacgtggtgactgatcctaacatcttgctgggcatgcagacaacggtacacattgcggagctagtcaaggcatgtcatccgtcacccgatgttgtgagcgctgtaggggagcacctgaactggctcaacaaactcttactcccacttaaggaatcgactcagttgcaaggaagcgagtcgtacaaggagtgccttgcactcttgggtcgtgttcacgctgcgatgaagatggtgagaattggcttagtagtgccccagctgcaatacagaatgtacggtagcctcatcaaccaaatggcccaagtagcacaaaactacgaccgagaattcaagcaattcaaattattcatcatccaaaatcaaatccttggcagctatttgctgcagcagaacagggcatttgctgagagggagctgcagatggagagctttcatgctgctgtcatttctcaaagaagggaggagttggacaatacattcgcaaagatggaccgattgagcgggcaaatggaggcagagagtagtgcaatggagcaagccaaaaaggaaatggacgaaggattgaggcagttccagaataggcaagttgcgaacgccctctttgccgttcttagcgctgtagctcagattgggcttgcattccttacggctggtgcaacggctcctggagctgtggcgtcggcggggcaagctgtgagcatagcaggtcaggcggcgcaaggtctgcgaagggtggtggaaattctagagcagctggaggctgtgatggaggttgtggctgctgtgaaggacctcgtggattcattggaacaggtaggtcagattgtggacgcaccggtgatgccggaattgccctcagaggcggactggtccatttttgtgaacgaggtggaggccgtggcagagggcatgccaacggaagtctcggaggttccggtgtggcagggcaggtgcaagaatgtggctgcactgggtcgggagatgagcatcacggcagtacagatgtcggagctgcagtatgacatctgggtgcaaggcatgatgcgggatatggctcgaagccaggcagacaggctggccgcaattcaacccgcggaccttaccaactatttggagatggctacccagatggatatgcggactacgaggatgctgctggggctcctcaacatattgcgcatccagaatgcggcgctcaggtacgagtatcttctaatgcccacggagctcacaacatggccactgggtatggataccgtgggtgacttgctcatcgcgcaggagaatgctgcactgataggattaatgcagctagggccctcatctgatttcacgagcaggcatgtggtgaaagacatacctgtgaacttgctgctcgatggcgaggattgggagtttgagattcctgtgcaagctggcatgtccagcttcccttccagctggtctcgcgtccgtattcggcacctggagatgcactttgtgaaggaggccagcggtattggtggtgagattatccaccagcctaccacccagactgggaccgtttacatccttctgcagggttccactatcttccatgaccgcagaagagaccaggtgttgccttttcaggccgctgctccgctcaactaccattacgcgtaccgcctcgacaccggcgactccactctcacaaacgaaccctctgaacagtttgccaacaagttcatgcagatgacacccttcacccgttggaggcttcgtctgtctgcgtccgcaaaagagaatgcaggattagcctttcccacggctacagcacttgactccactacccagattgtcatcactttccatgttacggccatcagacaaattgactggcggcacgacgaagag

SEQ ID NO: 321 - DNA, 2601 bp, synthetic construct
  misc_feature 1..2601: note = PtIP-83 polypeptide variant encoding polynucleotide
  source 1..2601: mol_type = other DNA
atggctctcgtggattacggcaagcttttcgaggatctgaaccagataagcatgggtgtactggatcgggtagagttttcagaggtgatggtgatccacaggatgtatgtgaggctagctgatctgaatgtggggcagctcgagggagccgagaaagtgaagcggttgtatgtgtttgcggacgtggtggagctaccagtcgtggaatggcggtggccgccgcaaataccaggatcggtgacggtgatcatattgtgtcgtcttcttcaatggccaactgatgggaggcagtcggacaccgagctccacctgacattcatgaagttgcatgccatacaacgagaggaaaatcggtgggagataaccgcagcagatggcatgaactggggagtttacatacacgcagaggaagtacaggttggcgtgctgacaatgtcatggtcttcggtacttagagtttcggcacttcgctctgttataacctccggctttcgcgccgttagtgtgtttgaggtaccgggaagtgtaaggtccacccttggagctactttaaggcccgatcacgccttatatagtacaactatgcaagccacacccaacgcatcgcatattagtgcttttaaccttcgcatagtttccccgtcggcatatcgtgtttgtcctctccaaaatgacacagatacctacttaggtattccagcagacgtggcggcagttcttccagtagacgtggtgactgatcctaacatcttgctgggcatgcagacaacggtacacattgcggagctagtcaaggcatgtcatccgtcacccgatgttgtgagcgctgtaggggagcacctgaactggctcaacaaactcttactcccacttaaggaatcgactcagttgcaaggaagcgagtcgtacaaggagtgccttgcactcttgggtcgtgttcacgctgcgatgaagatggtgagaattggcttagtagtgccccagctgcaatacagaatgtacggtagcctcatcaaccaaatggcccaagtagcacaaaactacgaccgagaattcaagcaattcaaattattcatcatccaaaatcaaatccttggcagctatttgctgcagcagaacagggcatttgctgagagggagctgcagatggagagctttcatgctgctgtcatttctcaaagaagggaggagttggacaatacattcgcaaagatggaccgattgagcgggcaaatggaggcagagagtagtgcaatggagcaagccaaaaaggaaatggacgaaggattgaggcagttccagaataggcaagttgcgaacgccctctttgccgttcttagcgctgtagctcagattgggcttgcattccttacggctggtgcaacggctcctggagctgtggcgtcggcggggcaagctgtgagcatagcaggtcaggcggcgcaaggtctgcgaagggtggtggaaattctagagcagctggaggctgtgatggaggttgtggctgctgtgaaggacctcgtggattcattggaacaggtaggtcagattgtggacgcaccggtgatgccggaattgccctcagaggcggactggtccatttttgtgaacgaggtggaggccgtggcagagggcatgccaacggaagtctcggaggttccggtgtggcaggtcaggtgcaagtccgtggctgcactgggtcgggagatgagcatcacggcagtacagatgtcggagctgcagtatgacatctgggtgcaaggcatgatgcgggatatggctcgaagccaggcagacaggctggccgcaattcaacccgcggaccttaccaactatttggagatggctacccagatggatatgcggactacgaggatgctgctggggctcctcaacatattgcgcatccagaatgcggcgctcaggtacgagtatcttctaatgcccacggagctcacaacatggccactgggtatggataccgtgggtgacttgctcatcgcgcaggagaatgctgcactgataggattaatgcagctagggccctcatctgatttcacgagcaggcatgtggtgaaagacatacctgtgaacttgctgctcgatggcgaggattgggagtttgagattcctgtgcaagctggcatgtccagcttcccttccagctggtctcgcgtccgtattcggcacctggagatgcactttgtgaaggaggccagcggtattggtggtgagattatccaccagcctaccacccagactgggaccgtttacatccttctgcagggttccactatcttccatgaccgcagaagagaccaggtgttgccttttcaggccgctgctccgctcaactaccattacgcgtaccgcctcgacaccggcgactccactctcacaaacgaaccctctgaacagtttgccaacaagttcatgcagatgacacccttcacccgttggaggcttcgtctgtctgcgtccgcaaaagagaatgcaggattagcctttcccacggctacagcacttgactccactacccagattgtcatcactttccatgttacggccatcagacaaattgactggcggcacgacgaagag

SEQ ID NO: 322 - DNA, 2601 bp, synthetic construct
  misc_feature 1..2601: note = PtIP-83 polypeptide variant encoding polynucleotide
  source 1..2601: mol_type = other DNA
atggctctcgtggattacggcaagcttttcgaggatctgaaccagataagcatgggtgtactggatcgggtagagttttcagaggtgatggtgatccacaggatgtatgtgaggctagctgatctgaatgtggggcagctcgagggagccgagaaagtgaagcggttgtatgtgtttgcggacgtggtggagctaccagtcgtggaatggcggtggccgccgcaaataccaggatcggtgacggtgatcatattgtgtcgtcttcttcaatggccaactgatgggaggcagtcggacaccgagctccacctgacattcatgaagttgcatgccatacaacgagaggaaaatcggtgggagataaccgcagcagatggcatgaactggggagtttacatacacgcagaggaagtacaggttggcgtgctgacaatgtcatggtcttcggtacttagagtttcggcacttcgctctgttataacctccggctttcgcgccgttagtgtgtttgaggtaccgggaagtgtaaggtccacccttggagctactttaaggcccgatcacgccttatatagtacaactatgcaagccacacccaacgcatcgcatattagtgcttttaaccttcgcatagtttccccgtcggcatatcgtgtttgtcctctccaaaatgacacagatacctacttaggtattccagcagacgtggcggcagttcttccagtagacgtggtgactgatcctaacatcttgctgggcatgcagacaacggtacacattgcggagctagtcaaggcatgtcatccgtcacccgatgttgtgagcgctgtaggggagcacctgaactggctcaacaaactcttactcccacttaaggaatcgactcagttgcaaggaagcgagtcgtacaaggagtgccttgcactcttgggtcgtgttcacgctgcgatgaagatggtgagaattggcttagtagtgccccagctgcaatacagaatgtacggtagcctcatcaaccaaatggcccaagtagcacaaaactacgaccgagaattcaagcaattcaaattattcatcatccaaaatcaaatccttggcagctatttgctgcagcagaacagggcatttgctgagagggagctgcagatggagagctttcatgctgctgtcatttctcaaagaagggaggagttggacaatacattcgcaaagatggaccgattgagcgggcaaatggaggcagagagtagtgcaatggagcaagccaaaaaggaaatggacgaaggattgaggcagttccagaataggcaagttgcgaacgccctctttgccgttcttagcgctgtagctcagattgggcttgcattccttacggctggtgcaacggctcctggagctgtggcgtcggcggggcaagctgtgagcatagcaggtcaggcggcgcaaggtctgcgaagggtggtggaaattctagagcagctggaggctgtgatggaggttgtggctgctgtgaaggacctcgtggattcattggaacaggtaggtcagattgtggacgcaccggtgatgccggaattgccctcagaggcggactggtccatttttgtgaacgaggtggaggccgtggcagagggcatgccaacggaagtctcggaggttccggtgtggagggccaggtgcaagaatgtggctgcactgggtcgggagatgagcatcgcggcagtacagatgtcggagctgcagtatgacatctgggtgcaaggcatgatgcgggatatggctcgaagccaggcagacaggctggccgcaattcaacccgcggaccttaccaactatttggagatggctacccagatggatatgcggactacgaggatgctgctggggctcctcaacatattgcgcatccagaatgcggcgctcaggtacgagtatcttctaatgcccacggagctcacaacatggccactgggtatggataccgtgggtgacttgctcatcgcgcaggagaatgctgcactgataggattaatgcagctagggccctcatctgatttcacgagcaggcatgtggtgaaagacatacctgtgaacttgctgctcgatggcgaggattgggagtttgagattcctgtgcaagctggcatgtccagcttcccttccagctggtctcgcgtccgtattcggcacctggagatgcactttgtgaaggaggccagcggtattggtggtgagattatccaccagcctaccacccagactgggaccgtttacatccttctgcagggttccactatcttccatgaccgcagaagagaccaggtgttgccttttcaggccgctgctccgctcaactaccattacgcgtaccgcctcgacaccggcgactccactctcacaaacgaaccctctgaacagtttgccaacaagttcatgcagatgacacccttcacccgttggaggcttcgtctgtctgcgtccgcaaaagagaatgcaggattagcctttcccacggctacagcacttgactccactacccagattgtcatcactttccatgttacggccatcagacaaattgactggcggcacgacgaagag

SEQ ID NO: 323 - DNA, 2601 bp, synthetic construct
  misc_feature 1..2601: note = PtIP-83 polypeptide variant encoding polynucleotide
  source 1..2601: mol_type = other DNA
atggctctcgtggattacggcaagcttttcgaggatctgaaccagataagcatgggtgtactggatcgggtagagttttcagaggtgatggtgatccacaggatgtatgtgaggctagctgatctgaatgtggggcagctcgagggagccgagaaagtgaagcggttgtatgtgtttgcggacgtggtggagctaccagtcgtggaatggcggtggccgccgcaaataccaggatcggtgacggtgatcatattgtgtcgtcttcttcaatggccaactgatgggaggcagtcggacaccgagctccacctgacattcatgaagttgcatgccatacaacgagaggaaaatcggtgggagataaccgcagcagatggcatgaactggggagtttacatacacgcagaggaagtacaggttggcgtgctgacaatgtcatggtcttcggtacttagagtttcggcacttcgctctgttataacctccggctttcgcgccgttagtgtgtttgaggtaccgggaagtgtaaggtccacccttggagctactttaaggcccgatcacgccttatatagtacaactatgcaagccacacccaacgcatcgcatattagtgcttttaaccttcgcatagtttccccgtcggcatatcgtgtttgtcctctccaaaatgacacagatacctacttaggtattccagcagacgtggcggcagttcttccagtagacgtggtgactgatcctaacatcttgctgggcatgcagacaacggtacacattgcggagctagtcaaggcatgtcatccgtcacccgatgttgtgagcgctgtaggggagcacctgaactggctcaacaaactcttactcccacttaaggaatcgactcagttgcaaggaagcgagtcgtacaaggagtgccttgcactcttgggtcgtgttcacgctgcgatgaagatggtgagaattggcttagtagtgccccagctgcaatacagaatgtacggtagcctcatcaaccaaatggcccaagtagcacaaaactacgaccgagaattcaagcaattcaaattattcatcatccaaaatcaaatccttggcagctatttgctgcagcagaacagggcatttgctgagagggagctgcagatggagagctttcatgctgctgtcatttctcaaagaagggaggagttggacaatacattcgcaaagatggaccgattgagcgggcaaatggaggcagagagtagtgcaatggagcaagccaaaaaggaaatggacgaaggattgaggcagttccagaataggcaagttgcgaacgccctctttgccgttcttagcgctgtagctcagattgggcttgcattccttacggctggtgcaacggctcctggagctgtggcgtcggcggggcaagctgtgagcatagcaggtcaggcggcgcaaggtctgcgaagggtggtggaaattctagagcagctggaggctgtgatggaggttgtggctgctgtgaaggacctcgtggattcattggaacaggtaggtcagattgtggacgcaccggtgatgccggaattgccctcagaggcggactggtccatttttgtgaacgaggtggaggccgtggcagagggcatgccaacggaagtctcggaggttccggtgtggaggggcaagtgcaagagcgtggctgcactgggtcgggagatgagcatcacggcagtacagatgtcggagctgcagtatgacatctgggtgcaaggcatgatgcgggatatggctcgaagccaggcagacaggctggccgcaattcaacccgcggaccttaccaactatttggagatggctacccagatggatatgcggactacgaggatgctgctggggctcctcaacatattgcgcatccagaatgcggcgctcaggtacgagtatcttctaatgcccacggagctcacaacatggccactgggtatggataccgtgggtgacttgctcatcgcgcaggagaatgctgcactgataggattaatgcagctagggccctcatctgatttcacgagcaggcatgtggtgaaagacatacctgtgaacttgctgctcgatggcgaggattgggagtttgagattcctgtgcaagctggcatgtccagcttcccttccagctggtctcgcgtccgtattcggcacctggagatgcactttgtgaaggaggccagcggtattggtggtgagattatccaccagcctaccacccagactgggaccgtttacatccttctgcagggttccactatcttccatgaccgcagaagagaccaggtgttgccttttcaggccgctgctccgctcaactaccattacgcgtaccgcctcgacaccggcgactccactctcacaaacgaaccctctgaacagtttgccaacaagttcatgcagatgacacccttcacccgttggaggcttcgtctgtctgcgtccgcaaaagagaatgcaggattagcctttcccacggctacagcacttgactccactacccagattgtcatcactttccatgttacggccatcagacaaattgactggcggcacgacgaagag

SEQ ID NO: 324 - DNA, 2601 bp, synthetic construct
  misc_feature 1..2601: note = PtIP-83 polypeptide variant encoding polynucleotide
  source 1..2601: mol_type = other DNA
atggctctcgtggattacggcaagcttttcgaggatctgaaccagataagcatgggtgtactggatcgggtagagttttcagaggtgatggtgatccacaggatgtatgtgaggctagctgatctgaatgtggggcagctcgagggagccgagaaagtgaagcggttgtatgtgtttgcggacgtggtggagctaccagtcgtggaatggcggtggccgccgcaaataccaggatcggtgacggtgatcatattgtgtcgtcttcttcaatggccaactgatgggaggcagtcggacaccgagctccacctgacattcatgaagttgcatgccatacaacgagaggaaaatcggtgggagataaccgcagcagatggcatgaactggggagtttacatacacgcagaggaagtacaggttggcgtgctgacaatgtcatggtcttcggtacttagagtttcggcacttcgctctgttataacctccggctttcgcgccgttagtgtgtttgaggtaccgggaagtgtaaggtccacccttggagctactttaaggcccgatcacgccttatatagtacaactatgcaagccacacccaacgcatcgcatattagtgcttttaaccttcgcatagtttccccgtcggcatatcgtgtttgtcctctccaaaatgacacagatacctacttaggtattccagcagacgtggcggcagttcttccagtagacgtggtgactgatcctaacatcttgctgggcatgcagacaacggtacacattgcggagctagtcaaggcatgtcatccgtcacccgatgttgtgagcgctgtaggggagcacctgaactggctcaacaaactcttactcccacttaaggaatcgactcagttgcaaggaagcgagtcgtacaaggagtgccttgcactcttgggtcgtgttcacgctgcgatgaagatggtgagaattggcttagtagtgccccagctgcaatacagaatgtacggtagcctcatcaaccaaatggcccaagtagcacaaaactacgaccgagaattcaagcaattcaaattattcatcatccaaaatcaaatccttggcagctatttgctgcagcagaacagggcatttgctgagagggagctgcagatggagagctttcatgctgctgtcatttctcaaagaagggaggagttggacaatacattcgcaaagatggaccgattgagcgggcaaatggaggcagagagtagtgcaatggagcaagccaaaaaggaaatggacgaaggattgaggcagttccagaataggcaagttgcgaacgccctctttgccgttcttagcgctgtagctcagattgggcttgcattccttacggctggtgcaacggctcctggagctgtggcgtcggcggggcaagctgtgagcatagcaggtcaggcggcgcaaggtctgcgaagggtggtggaaattctagagcagctggaggctgtgatggaggttgtggctgctgtgaaggacctcgtggattcattggaacaggtaggtcagattgtggacgcaccggtgatgccggaattgccctcagaggcggactggtccatttttgtgaacgaggtggaggccgtggcagagggcatgccaacggaagtctcggaggttccggtgtggaggggcaggtgcaagaccgtggctgcactgggtcgggagatgagcatcacggcagtacagatgtcggagctgcagtatgacatctgggtgcaaggcatgatgcgggatatggctcgaagccaggcagacaggctggccgcaattcaacccgcggaccttaccaactatttggagatggctacccagatggatatgcggactacgaggatgctgctggggctcctcaacatattgcgcatccagaatgcggcgctcaggtacgagtatcttctaatgcccacggagctcacaacatggccactgggtatggataccgtgggtgacttgctcatcgcgcaggagaatgctgcactgataggattaatgcagctagggccctcatctgatttcacgagcaggcatgtggtgaaagacatacctgtgaacttgctgctcgatggcgaggattgggagtttgagattcctgtgcaagctggcatgtccagcttcccttccagctggtctcgcgtccgtattcggcacctggagatgcactttgtgaaggaggccagcggtattggtggtgagattatccaccagcctaccacccagactgggaccgtttacatccttctgcagggttccactatcttccatgaccgcagaagagaccaggtgttgccttttcaggccgctgctccgctcaactaccattacgcgtaccgcctcgacaccggcgactccactctcacaaacgaaccctctgaacagtttgccaacaagttcatgcagatgacacccttcacccgttggaggcttcgtctgtctgcgtccgcaaaagagaatgcaggattagcctttcccacggctacagcacttgactccactacccagattgtcatcactttccatgttacggccatcagacaaattgactggcggcacgacgaagag

SEQ ID NO: 325 - DNA, 2601 bp, synthetic construct
  misc_feature 1..2601: note = PtIP-83 polypeptide variant encoding polynucleotide
  source 1..2601: mol_type = other DNA
atggctctcgtggattacggcaagcttttcgaggatctgaaccagataagcatgggtgtactggatcgggtagagttttcagaggtgatggtgatccacaggatgtatgtgaggctagctgatctgaatgtggggcagctcgagggagccgagaaagtgaagcggttgtatgtgtttgcggacgtggtggagctaccagtcgtggaatggcggtggccgccgcaaataccaggatcggtgacggtgatcatattgtgtcgtcttcttcaatggccaactgatgggaggcagtcggacaccgagctccacctgacattcatgaagttgcatgccatacaacgagaggaaaatcggtgggagataaccgcagcagatggcatgaactggggagtttacatacacgcagaggaagtacaggttggcgtgctgacaatgtcatggtcttcggtacttagagtttcggcacttcgctctgttataacctccggctttcgcgccgttagtgtgtttgaggtaccgggaagtgtaaggtccacccttggagctactttaaggcccgatcacgccttatatagtacaactatgcaagccacacccaacgcatcgcatattagtgcttttaaccttcgcatagtttccccgtcggcatatcgtgtttgtcctctccaaaatgacacagatacctacttaggtattccagcagacgtggcggcagttcttccagtagacgtggtgactgatcctaacatcttgctgggcatgcagacaacggtacacattgcggagctagtcaaggcatgtcatccgtcacccgatgttgtgagcgctgtaggggagcacctgaactggctcaacaaactcttactcccacttaaggaatcgactcagttgcaaggaagcgagtcgtacaaggagtgccttgcactcttgggtcgtgttcacgctgcgatgaagatggtgagaattggcttagtagtgccccagctgcaatacagaatgtacggtagcctcatcaaccaaatggcccaagtagcacaaaactacgaccgagaattcaagcaattcaaattattcatcatccaaaatcaaatccttggcagctatttgctgcagcagaacagggcatttgctgagagggagctgcagatggagagctttcatgctgctgtcatttctcaaagaagggaggagttggacaatacattcgcaaagatggaccgattgagcgggcaaatggaggcagagagtagtgcaatggagcaagccaaaaaggaaatggacgaaggattgaggcagttccagaataggcaagttgcgaacgccctctttgccgttcttagcgctgtagctcagattgggcttgcattccttacggctggtgcaacggctcctggagctgtggcgtcggcggggcaagctgtgagcatagcaggtcaggcggcgcaaggtctgcgaagggtggtggaaattctagagcagctggaggctgtgatggaggttgtggctgctgtgaaggacctcgtggattcattggaacaggtaggtcagattgtggacgcaccggtgatgccggaattgccctcagaggcggactggtccatttttgtgaacgaggtggaggccgtggcagagggcatgccaacggaagtctcggaggttccggtgtggagcgccaggtgcaagagcgtggctgcactgggtcgggagatgagcatcacggcagtacagatgtcggagctgcagtatgacatctgggtgcaaggcatgatgcgggatatggctcgaagccaggcagacaggctggccgcaattcaacccgcggaccttaccaactatttggagatggctacccagatggatatgcggactacgaggatgctgctggggctcctcaacatattgcgcatccagaatgcggcgctcaggtacgagtatcttctaatgcccacggagctcacaacatggccactgggtatggataccgtgggtgacttgctcatcgcgcaggagaatgctgcactgataggattaatgcagctagggccctcatctgatttcacgagcaggcatgtggtgaaagacatacctgtgaacttgctgctcgatggcgaggattgggagtttgagattcctgtgcaagctggcatgtccagcttcccttccagctggtctcgcgtccgtattcggcacctggagatgcactttgtgaaggaggccagcggtattggtggtgagattatccaccagcctaccacccagactgggaccgtttacatccttctgcagggttccactatcttccatgaccgcagaagagaccaggtgttgccttttcaggccgctgctccgctcaactaccattacgcgtaccgcctcgacaccggcgactccactctcacaaacgaaccctctgaacagtttgccaacaagttcatgcagatgacacccttcacccgttggaggcttcgtctgtctgcgtccgcaaaagagaatgcaggattagcctttcccacggctacagcacttgactccactacccagattgtcatcactttccatgttacggccatcagacaaattgactggcggcacgacgaagag

SEQ ID NO: 326 - DNA, 2601 bp, synthetic construct
  misc_feature 1..2601: note = PtIP-83 polypeptide variant encoding polynucleotide
  source 1..2601: mol_type = other DNA
atggctctcgtggattacggcaagcttttcgaggatctgaaccagataagcatgggtgtactggatcgggtagagttttcagaggtgatggtgatccacaggatgtatgtgaggctagctgatctgaatgtggggcagctcgagggagccgagaaagtgaagcggttgtatgtgtttgcggacgtggtggagctaccagtcgtggaatggcggtggccgccgcaaataccaggatcggtgacggtgatcatattgtgtcgtcttcttcaatggccaactgatgggaggcagtcggacaccgagctccacctgacattcatgaagttgcatgccatacaacgagaggaaaatcggtgggagataaccgcagcagatggcatgaactggggagtttacatacacgcagaggaagtacaggttggcgtgctgacaatgtcatggtcttcggtacttagagtttcggcacttcgctctgttataacctccggctttcgcgccgttagtgtgtttgaggtaccgggaagtgtaaggtccacccttggagctactttaaggcccgatcacgccttatatagtacaactatgcaagccacacccaacgcatcgcatattagtgcttttaaccttcgcatagtttccccgtcggcatatcgtgtttgtcctctccaaaatgacacagatacctacttaggtattccagcagacgtggcggcagttcttccagtagacgtggtgactgatcctaacatcttgctgggcatgcagacaacggtacacattgcggagctagtcaaggcatgtcatccgtcacccgatgttgtgagcgctgtaggggagcacctgaactggctcaacaaactcttactcccacttaaggaatcgactcagttgcaaggaagcgagtcgtacaaggagtgccttgcactcttgggtcgtgttcacgctgcgatgaagatggtgagaattggcttagtagtgccccagctgcaatacagaatgtacggtagcctcatcaaccaaatggcccaagtagcacaaaactacgaccgagaattcaagcaattcaaattattcatcatccaaaatcaaatccttggcagctatttgctgcagcagaacagggcatttgctgagagggagctgcagatggagagctttcatgctgctgtcatttctcaaagaagggaggagttggacaatacattcgcaaagatggaccgattgagcgggcaaatggaggcagagagtagtgcaatggagcaagccaaaaaggaaatggacgaaggattgaggcagttccagaataggcaagttgcgaacgccctctttgccgttcttagcgctgtagctcagattgggcttgcattccttacggctggtgcaacggctcctggagctgtggcgtcggcggggcaagctgtgagcatagcaggtcaggcggcgcaaggtctgcgaagggtggtggaaattctagagcagctggaggctgtgatggaggttgtggctgctgtgaaggacctcgtggattcattggaacaggtaggtcagattgtggacgcaccggtgatgccggaattgccctcagaggcggactggtccatttttgtgaacgaggtggaggccgtggcagagggcatgccaacggaagtctcggaggttccggtgtggagcgtcaagtgcaagcatgtggctgcactgggtcgggagatgagcatcacggcagtacagatgtcggagctgcagtatgacatctgggtgcaaggcatgatgcgggatatggctcgaagccaggcagacaggctggccgcaattcaacccgcggaccttaccaactatttggagatggctacccagatggatatgcggactacgaggatgctgctggggctcctcaacatattgcgcatccagaatgcggcgctcaggtacgagtatcttctaatgcccacggagctcacaacatggccactgggtatggataccgtgggtgacttgctcatcgcgcaggagaatgctgcactgataggattaatgcagctagggccctcatctgatttcacgagcaggcatgtggtgaaagacatacctgtgaacttgctgctcgatggcgaggattgggagtttgagattcctgtgcaagctggcatgtccagcttcccttccagctggtctcgcgtccgtattcggcacctggagatgcactttgtgaaggaggccagcggtattggtggtgagattatccaccagcctaccacccagactgggaccgtttacatccttctgcagggttccactatcttccatgaccgcagaagagaccaggtgttgccttttcaggccgctgctccgctcaactaccattacgcgtaccgcctcgacaccggcgactccactctcacaaacgaaccctctgaacagtttgccaacaagttcatgcagatgacacccttcacccgttggaggcttcgtctgtctgcgtccgcaaaagagaatgcaggattagcctttcccacggctacagcacttgactccactacccagattgtcatcactttccatgttacggccatcagacaaattgactggcggcacgacgaagag

SEQ ID NO: 327 - DNA, 2601 bp, synthetic construct
  misc_feature 1..2601: note = PtIP-83 polypeptide variant encoding polynucleotide
  source 1..2601: mol_type = other DNA
atggctctcgtggattacggcaagcttttcgaggatctgaaccagataagcatgggtgtactggatcgggtagagttttcagaggtgatggtgatccacaggatgtatgtgaggctagctgatctgaatgtggggcagctcgagggagccgagaaagtgaagcggttgtatgtgtttgcggacgtggtggagctaccagtcgtggaatggcggtggccgccgcaaataccaggatcggtgacggtgatcatattgtgtcgtcttcttcaatggccaactgatgggaggcagtcggacaccgagctccacctgacattcatgaagttgcatgccatacaacgagaggaaaatcggtgggagataaccgcagcagatggcatgaactggggagtttacatacacgcagaggaagtacaggttggcgtgctgacaatgtcatggtcttcggtacttagagtttcggcacttcgctctgttataacctccggctttcgcgccgttagtgtgtttgaggtaccgggaagtgtaaggtccacccttggagctactttaaggcccgatcacgccttatatagtacaactatgcaagccacacccaacgcatcgcatattagtgcttttaaccttcgcatagtttccccgtcggcatatcgtgtttgtcctctccaaaatgacacagatacctacttaggtattccagcagacgtggcggcagttcttccagtagacgtggtgactgatcctaacatcttgctgggcatgcagacaacggtacacattgcggagctagtcaaggcatgtcatccgtcacccgatgttgtgagcgctgtaggggagcacctgaactggctcaacaaactcttactcccacttaaggaatcgactcagttgcaaggaagcgagtcgtacaaggagtgccttgcactcttgggtcgtgttcacgctgcgatgaagatggtgagaattggcttagtagtgccccagctgcaatacagaatgtacggtagcctcatcaaccaaatggcccaagtagcacaaaactacgaccgagaattcaagcaattcaaattattcatcatccaaaatcaaatccttggcagctatttgctgcagcagaacagggcatttgctgagagggagctgcagatggagagctttcatgctgctgtcatttctcaaagaagggaggagttggacaatacattcgcaaagatggaccgattgagcgggcaaatggaggcagagagtagtgcaatggagcaagccaaaaaggaaatggacgaaggattgaggcagttccagaataggcaagttgcgaacgccctctttgccgttcttagcgctgtagctcagattgggcttgcattccttacggctggtgcaacggctcctggagctgtggcgtcggcggggcaagctgtgagcatagcaggtcaggcggcgcaaggtctgcgaagggtggtggaaattctagagcagctggaggctgtgatggaggttgtggctgctgtgaaggacctcgtggattcattggaacaggtaggtcagattgtggacgcaccggtgatgccggaattgccctcagaggcggactggtccatttttgtgaacgaggtggaggccgtggcagagggcatgccaacggaagtctcggaggttccggtgtggacgggccggtgcaagaccgtggctgcactgggtcgggagatgagcatcacggcagtacagatgtcggagctgcagtatgacatctgggtgcaaggcatgatgcgggatatggctcgaagccaggcagacaggctggccgcaattcaacccgcggaccttaccaactatttggagatggctacccagatggatatgcggactacgaggatgctgctggggctcctcaacatattgcgcatccagaatgcggcgctcaggtacgagtatcttctaatgcccacggagctcacaacatggccactgggtatggataccgtgggtgacttgctcatcgcgcaggagaatgctgcactgataggattaatgcagctagggccctcatctgatttcacgagcaggcatgtggtgaaagacatacctgtgaacttgctgctcgatggcgaggattgggagtttgagattcctgtgcaagctggcatgtccagcttcccttccagctggtctcgcgtccgtattcggcacctggagatgcactttgtgaaggaggccagcggtattggtggtgagattatccaccagcctaccacccagactgggaccgtttacatccttctgcagggttccactatcttccatgaccgcagaagagaccaggtgttgccttttcaggccgctgctccgctcaactaccattacgcgtaccgcctcgacaccggcgactccactctcacaaacgaaccctctgaacagtttgccaacaagttcatgcagatgacacccttcacccgttggaggcttcgtctgtctgcgtccgcaaaagagaatgcaggattagcctttcccacggctacagcacttgactccactacccagattgtcatcactttccatgttacggccatcagacaaattgactggcggcacgacgaagag

SEQ ID NO: 328 - DNA, 2601 bp, synthetic construct
  misc_feature 1..2601: note = PtIP-83 polypeptide variant encoding polynucleotide
  source 1..2601: mol_type = other DNA
atggctctcgtggattacggcaagcttttcgaggatctgaaccagataagcatgggtgtactggatcgggtagagttttcagaggtgatggtgatccacaggatgtatgtgaggctagctgatctgaatgtggggcagctcgagggagccgagaaagtgaagcggttgtatgtgtttgcggacgtggtggagctaccagtcgtggaatggcggtggccgccgcaaataccaggatcggtgacggtgatcatattgtgtcgtcttcttcaatggccaactgatgggaggcagtcggacaccgagctccacctgacattcatgaagttgcatgccatacaacgagaggaaaatcggtgggagataaccgcagcagatggcatgaactggggagtttacatacacgcagaggaagtacaggttggcgtgctgacaatgtcatggtcttcggtacttagagtttcggcacttcgctctgttataacctccggctttcgcgccgttagtgtgtttgaggtaccgggaagtgtaaggtccacccttggagctactttaaggcccgatcacgccttatatagtacaactatgcaagccacacccaacgcatcgcatattagtgcttttaaccttcgcatagtttccccgtcggcatatcgtgtttgtcctctccaaaatgacacagatacctacttaggtattccagcagacgtggcggcagttcttccagtagacgtggtgactgatcctaacatcttgctgggcatgcagacaacggtacacattgcggagctagtcaaggcatgtcatccgtcacccgatgttgtgagcgctgtaggggagcacctgaactggctcaacaaactcttactcccacttaaggaatcgactcagttgcaaggaagcgagtcgtacaaggagtgccttgcactcttgggtcgtgttcacgctgcgatgaagatggtgagaattggcttagtagtgccccagctgcaatacagaatgtacggtagcctcatcaaccaaatggcccaagtagcacaaaactacgaccgagaattcaagcaattcaaattattcatcatccaaaatcaaatccttggcagctatttgctgcagcagaacagggcatttgctgagagggagctgcagatggagagctttcatgctgctgtcatttctcaaagaagggaggagttggacaatacattcgcaaagatggaccgattgagcgggcaaatggaggcagagagtagtgcaatggagcaagccaaaaaggaaatggacgaaggattgaggcagttccagaataggcaagttgcgaacgccctctttgccgttcttagcgctgtagctcagattgggcttgcattccttacggctggtgcaacggctcctggagctgtggcgtcggcggggcaagctgtgagcatagcaggtcaggcggcgcaaggtctgcgaagggtggtggaaattctagagcagctggaggctgtgatggaggttgtggctgctgtgaaggacctcgtggattcattggaacaggtaggtcagattgtggacgcaccggtgatgccggaattgccctcagaggcggactggtccatttttgtgaacgaggtggaggccgtggcagagggcatgccaacggaagtctcggaggttccggtgtggaccggcaggtgcaaccatgtggctgcactgggtcaggagatgagcatcacggcagtacagatgtcggagctgcagtatgacatctgggtgcaaggcatgatgcgggatatggctcgaagccaggcagacaggctggccgcaattcaacccgcggaccttaccaactatttggagatggctacccagatggatatgcggactacgaggatgctgctggggctcctcaacatattgcgcatccagaatgcggcgctcaggtacgagtatcttctaatgcccacggagctcacaacatggccactgggtatggataccgtgggtgacttgctcatcgcgcaggagaatgctgcactgataggattaatgcagctagggccctcatctgatttcacgagcaggcatgtggtgaaagacatacctgtgaacttgctgctcgatggcgaggattgggagtttgagattcctgtgcaagctggcatgtccagcttcccttccagctggtctcgcgtccgtattcggcacctggagatgcactttgtgaaggaggccagcggtattggtggtgagattatccaccagcctaccacccagactgggaccgtttacatccttctgcagggttccactatcttccatgaccgcagaagagaccaggtgttgccttttcaggccgctgctccgctcaactaccattacgcgtaccgcctcgacaccggcgactccactctcacaaacgaaccctctgaacagtttgccaacaagttcatgcagatgacacccttcacccgttggaggcttcgtctgtctgcgtccgcaaaagagaatgcaggattagcctttcccacggctacagcacttgactccactacccagattgtcatcactttccatgttacggccatcagacaaattgactggcggcacgacgaagag

SEQ ID NO: 329 - DNA, 2601 bp, synthetic construct
  misc_feature 1..2601: note = PtIP-83 polypeptide variant encoding polynucleotide
  source 1..2601: mol_type = other DNA
atggctctcgtggattacggcaagcttttcgaggatctgaaccagataagcatgggtgtactggatcgggtagagttttcagaggtgatggtgatccacaggatgtatgtgaggctagctgatctgaatgtggggcagctcgagggagccgagaaagtgaagcggttgtatgtgtttgcggacgtggtggagctaccagtcgtggaatggcggtggccgccgcaaataccaggatcggtgacggtgatcatattgtgtcgtcttcttcaatggccaactgatgggaggcagtcggacaccgagctccacctgacattcatgaagttgcatgccatacaacgagaggaaaatcggtgggagataaccgcagcagatggcatgaactggggagtttacatacacgcagaggaagtacaggttggcgtgctgacaatgtcatggtcttcggtacttagagtttcggcacttcgctctgttataacctccggctttcgcgccgttagtgtgtttgaggtaccgggaagtgtaaggtccacccttggagctactttaaggcccgatcacgccttatatagtacaactatgcaagccacacccaacgcatcgcatattagtgcttttaaccttcgcatagtttccccgtcggcatatcgtgtttgtcctctccaaaatgacacagatacctacttaggtattccagcagacgtggcggcagttcttccagtagacgtggtgactgatcctaacatcttgctgggcatgcagacaacggtacacattgcggagctagtcaaggcatgtcatccgtcacccgatgttgtgagcgctgtaggggagcacctgaactggctcaacaaactcttactcccacttaaggaatcgactcagttgcaaggaagcgagtcgtacaaggagtgccttgcactcttgggtcgtgttcacgctgcgatgaagatggtgagaattggcttagtagtgccccagctgcaatacagaatgtacggtagcctcatcaaccaaatggcccaagtagcacaaaactacgaccgagaattcaagcaattcaaattattcatcatccaaaatcaaatccttggcagctatttgctgcagcagaacagggcatttgctgagagggagctgcagatggagagctttcatgctgctgtcatttctcaaagaagggaggagttggacaatacattcgcaaagatggaccgattgagcgggcaaatggaggcagagagtagtgcaatggagcaagccaaaaaggaaatggacgaaggattgaggcagttccagaataggcaagttgcgaacgccctctttgccgttcttagcgctgtagctcagattgggcttgcattccttacggctggtgcaacggctcctggagctgtggcgtcggcggggcaagctgtgagcatagcaggtcaggcggcgcaaggtctgcgaagggtggtggaaattctagagcagctggaggctgtgatggaggttgtggctgctgtgaaggacctcgtggattcattggaacaggtaggtcagattgtggacgcaccggtgatgccggaattgccctcagaggcggactggtccatttttgtgaacgaggtggaggccgtggcagagggcatgccaacggaagtctcggaggttccggtgtggacggtcaagtgcaagaatgtggctgcactgggtcgggagatgagcatcacggcagtacagatgtcggagctgcagtatgacatctgggtgcaaggcatgatgcgggatatggctcgaagccaggcagacaggctggccgcaattcaacccgcggaccttaccaactatttggagatggctacccagatggatatgcggactacgaggatgctgctggggctcctcaacatattgcgcatccagaatgcggcgctcaggtacgagtatcttctaatgcccacggagctcacaacatggccactgggtatggataccgtgggtgacttgctcatcgcgcaggagaatgctgcactgataggattaatgcagctagggccctcatctgatttcacgagcaggcatgtggtgaaagacatacctgtgaacttgctgctcgatggcgaggattgggagtttgagattcctgtgcaagctggcatgtccagcttcccttccagctggtctcgcgtccgtattcggcacctggagatgcactttgtgaaggaggccagcggtattggtggtgagattatccaccagcctaccacccagactgggaccgtttacatccttctgcagggttccactatcttccatgaccgcagaagagaccaggtgttgccttttcaggccgctgctccgctcaactaccattacgcgtaccgcctcgacaccggcgactccactctcacaaacgaaccctctgaacagtttgccaacaagttcatgcagatgacacccttcacccgttggaggcttcgtctgtctgcgtccgcaaaagagaatgcaggattagcctttcccacggctacagcacttgactccactacccagattgtcatcactttccatgttacggccatcagacaaattgactggcggcacgacgaagag

SEQ ID NO: 330 - DNA, 2601 bp, synthetic construct
  misc_feature 1..2601: note = PtIP-83 polypeptide variant encoding polynucleotide
  source 1..2601: mol_type = other DNA
atggctctcgtggattacggcaagcttttcgaggatctgaaccagataagcatgggtgtactggatcgggtagagttttcagaggtgatggtgatccacaggatgtatgtgaggctagctgatctgaatgtggggcagctcgagggagccgagaaagtgaagcggttgtatgtgtttgcggacgtggtggagctaccagtcgtggaatggcggtggccgccgcaaataccaggatcggtgacggtgatcatattgtgtcgtcttcttcaatggccaactgatgggaggcagtcggacaccgagctccacctgacattcatgaagttgcatgccatacaacgagaggaaaatcggtgggagataaccgcagcagatggcatgaactggggagtttacatacacgcagaggaagtacaggttggcgtgctgacaatgtcatggtcttcggtacttagagtttcggcacttcgctctgttataacctccggctttcgcgccgttagtgtgtttgaggtaccgggaagtgtaaggtccacccttggagctactttaaggcccgatcacgccttatatagtacaactatgcaagccacacccaacgcatcgcatattagtgcttttaaccttcgcatagtttccccgtcggcatatcgtgtttgtcctctccaaaatgacacagatacctacttaggtattccagcagacgtggcggcagttcttccagtagacgtggtgactgatcctaacatcttgctgggcatgcagacaacggtacacattgcggagctagtcaaggcatgtcatccgtcacccgatgttgtgagcgctgtaggggagcacctgaactggctcaacaaactcttactcccacttaaggaatcgactcagttgcaaggaagcgagtcgtacaaggagtgccttgcactcttgggtcgtgttcacgctgcgatgaagatggtgagaattggcttagtagtgccccagctgcaatacagaatgtacggtagcctcatcaaccaaatggcccaagtagcacaaaactacgaccgagaattcaagcaattcaaattattcatcatccaaaatcaaatccttggcagctatttgctgcagcagaacagggcatttgctgagagggagctgcagatggagagctttcatgctgctgtcatttctcaaagaagggaggagttggacaatacattcgcaaagatggaccgattgagcgggcaaatggaggcagagagtagtgcaatggagcaagccaaaaaggaaatggacgaaggattgaggcagttccagaataggcaagttgcgaacgccctctttgccgttcttagcgctgtagctcagattgggcttgcattccttacggctggtgcaacggctcctggagctgtggcgtcggcggggcaagctgtgagcatagcaggtcaggcggcgcaaggtctgcgaagggtggtggaaattctagagcagctggaggctgtgatggaggttgtggctgctgtgaaggacctcgtggattcattggaacaggtaggtcagattgtggacgcaccggtgatgccggaattgccctcagaggcggactggtccatttttgtgaacgaggtggaggccgtggcagagggcatgccaacggaagtctcggaggttccggtgtggaccgtcaagtgcaagagcgtggctgcactgggtcgggagatgagcatcacggcagtacagatgtcggagctgcagtatgacatctgggtgcaaggcatgatgcgggatatggctcgaagccaggcagacaggctggccgcaattcaacccgcggaccttaccaactatttggagatggctacccagatggatatgcggactacgaggatgctgctggggctcctcaacatattgcgcatccagaatgcggcgctcaggtacgagtatcttctaatgcccacggagctcacaacatggccactgggtatggataccgtgggtgacttgctcatcgcgcaggagaatgctgcactgataggattaatgcagctagggccctcatctgatttcacgagcaggcatgtggtgaaagacatacctgtgaacttgctgctcgatggcgaggattgggagtttgagattcctgtgcaagctggcatgtccagcttcccttccagctggtctcgcgtccgtattcggcacctggagatgcactttgtgaaggaggccagcggtattggtggtgagattatccaccagcctaccacccagactgggaccgtttacatccttctgcagggttccactatcttccatgaccgcagaagagaccaggtgttgccttttcaggccgctgctccgctcaactaccattacgcgtaccgcctcgacaccggcgactccactctcacaaacgaaccctctgaacagtttgccaacaagttcatgcagatgacacccttcacccgttggaggcttcgtctgtctgcgtccgcaaaagagaatgcaggattagcctttcccacggctacagcacttgactccactacccagattgtcatcactttccatgttacggccatcagacaaattgactggcggcacgacgaagag

SEQ ID NO: 331 - DNA, 2601 bp, synthetic construct
  misc_feature 1..2601: note = PtIP-83 polypeptide variant encoding polynucleotide
  source 1..2601: mol_type = other DNA
atggctctcgtggattacggcaagcttttcgaggatctgaaccagataagcatgggtgtactggatcgggtagagttttcagaggtgatggtgatccacaggatgtatgtgaggctagctgatctgaatgtggggcagctcgagggagccgagaaagtgaagcggttgtatgtgtttgcggacgtggtggagctaccagtcgtggaatggcggtggccgccgcaaataccaggatcggtgacggtgatcatattgtgtcgtcttcttcaatggccaactgatgggaggcagtcggacaccgagctccacctgacattcatgaagttgcatgccatacaacgagaggaaaatcggtgggagataaccgcagcagatggcatgaactggggagtttacatacacgcagaggaagtacaggttggcgtgctgacaatgtcatggtcttcggtacttagagtttcggcacttcgctctgttataacctccggctttcgcgccgttagtgtgtttgaggtaccgggaagtgtaaggtccacccttggagctactttaaggcccgatcacgccttatatagtacaactatgcaagccacacccaacgcatcgcatattagtgcttttaaccttcgcatagtttccccgtcggcatatcgtgtttgtcctctccaaaatgacacagatacctacttaggtattccagcagacgtggcggcagttcttccagtagacgtggtgactgatcctaacatcttgctgggcatgcagacaacggtacacattgcggagctagtcaaggcatgtcatccgtcacccgatgttgtgagcgctgtaggggagcacctgaactggctcaacaaactcttactcccacttaaggaatcgactcagttgcaaggaagcgagtcgtacaaggagtgccttgcactcttgggtcgtgttcacgctgcgatgaagatggtgagaattggcttagtagtgccccagctgcaatacagaatgtacggtagcctcatcaaccaaatggcccaagtagcacaaaactacgaccgagaattcaagcaattcaaattattcatcatccaaaatcaaatccttggcagctatttgctgcagcagaacagggcatttgctgagagggagctgcagatggagagctttcatgctgctgtcatttctcaaagaagggaggagttggacaatacattcgcaaagatggaccgattgagcgggcaaatggaggcagagagtagtgcaatggagcaagccaaaaaggaaatggacgaaggattgaggcagttccagaataggcaagttgcgaacgccctctttgccgttcttagcgctgtagctcagattgggcttgcattccttacggctggtgcaacggctcctggagctgtggcgtcggcggggcaagctgtgagcatagcaggtcaggcggcgcaaggtctgcgaagggtggtggaaattctagagcagctggaggctgtgatggaggttgtggctgctgtgaaggacctcgtggattcattggaacaggtaggtcagattgtggacgcaccggtgatgccggaattgccctcagaggcggactggtccatttttgtgaacgaggtggaggccgtggcagagggcatgccaacggaagtctcggaggttccggtgtggaccgtcaggtgcaagaatgtggctgcactgggtcgggagatgagcatcacggcagtacagatgtcggagctgcagtatgacatctgggtgcaaggcatgatgcgggatatggctcgaagccaggcagacaggctggccgcaattcaacccgcggaccttaccaactatttggagatggctacccagatggatatgcggactacgaggatgctgctggggctcctcaacatattgcgcatccagaatgcggcgctcaggtacgagtatcttctaatgcccacggagctcacaacatggccactgggtatggataccgtgggtgacttgctcatcgcgcaggagaatgctgcactgataggattaatgcagctagggccctcatctgatttcacgagcaggcatgtggtgaaagacatacctgtgaacttgctgctcgatggcgaggattgggagtttgagattcctgtgcaagctggcatgtccagcttcccttccagctggtctcgcgtccgtattcggcacctggagatgcactttgtgaaggaggccagcggtattggtggtgagattatccaccagcctaccacccagactgggaccgtttacatccttctgcagggttccactatcttccatgaccgcagaagagaccaggtgttgccttttcaggccgctgctccgctcaactaccattacgcgtaccgcctcgacaccggcgactccactctcacaaacgaaccctctgaacagtttgccaacaagttcatgcagatgacacccttcacccgttggaggcttcgtctgtctgcgtccgcaaaagagaatgcaggattagcctttcccacggctacagcacttgactccactacccagattgtcatcactttccatgttacggccatcagacaaattgactggcggcacgacgaagag

SEQ ID NO: 332 - DNA, 2601 bp, synthetic construct
  misc_feature 1..2601: note = PtIP-83 polypeptide variant encoding polynucleotide
  source 1..2601: mol_type = other DNA
atggctctcgtggattacggcaagcttttcgaggatctgaaccagataagcatgggtgtactggatcgggtagagttttcagaggtgatggtgatccacaggatgtatgtgaggctagctgatctgaatgtggggcagctcgagggagccgagaaagtgaagcggttgtatgtgtttgcggacgtggtggagctaccagtcgtggaatggcggtggccgccgcaaataccaggatcggtgacggtgatcatattgtgtcgtcttcttcaatggccaactgatgggaggcagtcggacaccgagctccacctgacattcatgaagttgcatgccatacaacgagaggaaaatcggtgggagataaccgcagcagatggcatgaactggggagtttacatacacgcagaggaagtacaggttggcgtgctgacaatgtcatggtcttcggtacttagagtttcggcacttcgctctgttataacctccggctttcgcgccgttagtgtgtttgaggtaccgggaagtgtaaggtccacccttggagctactttaaggcccgatcacgccttatatagtacaactatgcaagccacacccaacgcatcgcatattagtgcttttaaccttcgcatagtttccccgtcggcatatcgtgtttgtcctctccaaaatgacacagatacctacttaggtattccagcagacgtggcggcagttcttccagtagacgtggtgactgatcctaacatcttgctgggcatgcagacaacggtacacattgcggagctagtcaaggcatgtcatccgtcacccgatgttgtgagcgctgtaggggagcacctgaactggctcaacaaactcttactcccacttaaggaatcgactcagttgcaaggaagcgagtcgtacaaggagtgccttgcactcttgggtcgtgttcacgctgcgatgaagatggtgagaattggcttagtagtgccccagctgcaatacagaatgtacggtagcctcatcaaccaaatggcccaagtagcacaaaactacgaccgagaattcaagcaattcaaattattcatcatccaaaatcaaatccttggcagctatttgctgcagcagaacagggcatttgctgagagggagctgcagatggagagctttcatgctgctgtcatttctcaaagaagggaggagttggacaatacattcgcaaagatggaccgattgagcgggcaaatggaggcagagagtagtgcaatggagcaagccaaaaaggaaatggacgaaggattgaggcagttccagaataggcaagttgcgaacgccctctttgccgttcttagcgctgtagctcagattgggcttgcattccttacggctggtgcaacggctcctggagctgtggcgtcggcggggcaagctgtgagcatagcaggtcaggcggcgcaaggtctgcgaagggtggtggaaattctagagcagctggaggctgtgatggaggttgtggctgctgtgaaggacctcgtggattcattggaacaggtaggtcagattgtggacgcaccggtgatgccggaattgccctcagaggcggactggtccatttttgtgaacgaggtggaggccgtggcagagggcatgccaacggaagtctcggaggttccggtgtggagggcccggtgcaagcatgtggctgcactgggtcgggagatgagcatcacggcagtacagatgtcggagctgcagtatgacatctgggtgcaaggcatgatgcgggatatggctcgaagccaggcagacaggctggccgcaattcaacccgcggaccttaccaactatttggagatggctacccagatggatatgcggactacgaggatgctgctggggctcctcaacatattgcgcatccagaatgcggcgctcaggtacgagtatcttctaatgcccacggagctcacaacatggccactgggtatggataccgtgggtgacttgctcatcgcgcaggagaatgctgcactgataggattaatgcagctagggccctcatctgatttcacgagcaggcatgtggtgaaagacatacctgtgaacttgctgctcgatggcgaggattgggagtttgagattcctgtgcaagctggcatgtccagcttcccttccagctggtctcgcgtccgtattcggcacctggagatgcactttgtgaaggaggccagcggtattggtggtgagattatccaccagcctaccacccagactgggaccgtttacatccttctgcagggttccactatcttccatgaccgcagaagagaccaggtgttgccttttcaggccgctgctccgctcaactaccattacgcgtaccgcctcgacaccggcgactccactctcacaaacgaaccctctgaacagtttgccaacaagttcatgcagatgacacccttcacccgttggaggcttcgtctgtctgcgtccgcaaaagagaatgcaggattagcctttcccacggctacagcacttgactccactacccagattgtcatcactttccatgttacggccatcagacaaattgactggcggcacgacgaagag

SEQ ID NO: 333 - DNA, 2601 bp, synthetic construct
  misc_feature 1..2601: note = PtIP-83 polypeptide variant encoding polynucleotide
  source 1..2601: mol_type = other DNA
atggctctcgtggattacggcaagcttttcgaggatctgaaccagataagcatgggtgtactggatcgggtagagttttcagaggtgatggtgatccacaggatgtatgtgaggctagctgatctgaatgtggggcagctcgagggagccgagaaagtgaagcggttgtatgtgtttgcggacgtggtggagctaccagtcgtggaatggcggtggccgccgcaaataccaggatcggtgacggtgatcatattgtgtcgtcttcttcaatggccaactgatgggaggcagtcggacaccgagctccacctgacattcatgaagttgcatgccatacaacgagaggaaaatcggtgggagataaccgcagcagatggcatgaactggggagtttacatacacgcagaggaagtacaggttggcgtgctgacaatgtcatggtcttcggtacttagagtttcggcacttcgctctgttataacctccggctttcgcgccgttagtgtgtttgaggtaccgggaagtgtaaggtccacccttggagctactttaaggcccgatcacgccttatatagtacaactatgcaagccacacccaacgcatcgcatattagtgcttttaaccttcgcatagtttccccgtcggcatatcgtgtttgtcctctccaaaatgacacagatacctacttaggtattccagcagacgtggcggcagttcttccagtagacgtggtgactgatcctaacatcttgctgggcatgcagacaacggtacacattgcggagctagtcaaggcatgtcatccgtcacccgatgttgtgagcgctgtaggggagcacctgaactggctcaacaaactcttactcccacttaaggaatcgactcagttgcaaggaagcgagtcgtacaaggagtgccttgcactcttgggtcgtgttcacgctgcgatgaagatggtgagaattggcttagtagtgccccagctgcaatacagaatgtacggtagcctcatcaaccaaatggcccaagtagcacaaaactacgaccgagaattcaagcaattcaaattattcatcatccaaaatcaaatccttggcagctatttgctgcagcagaacagggcatttgctgagagggagctgcagatggagagctttcatgctgctgtcatttctcaaagaagggaggagttggacaatacattcgcaaagatggaccgattgagcgggcaaatggaggcagagagtagtgcaatggagcaagccaaaaaggaaatggacgaaggattgaggcagttccagaataggcaagttgcgaacgccctctttgccgttcttagcgctgtagctcagattgggcttgcattccttacggctggtgcaacggctcctggagctgtggcgtcggcggggcaagctgtgagcatagcaggtcaggcggcgcaaggtctgcgaagggtggtggaaattctagagcagctggaggctgtgatggaggttgtggctgctgtgaaggacctcgtggattcattggaacaggtaggtcagattgtggacgcaccggtgatgccggaattgccctcagaggcggactggtccatttttgtgaacgaggtggaggccgtggcagagggcatgccaacggaagtctcggaggttccggtgtggatcggccggtgcaagtccgtggctgcactgggtcgggagatgagcatcacggcagtacagatgtcggagctgcagtatgacatctgggtgcaaggcatgatgcgggatatggctcgaagccaggcagacaggctggccgcaattcaacccgcggaccttaccaactatttggagatggctacccagatggatatgcggactacgaggatgctgctggggctcctcaacatattgcgcatccagaatgcggcgctcaggtacgagtatcttctaatgcccacggagctcacaacatggccactgggtatggataccgtgggtgacttgctcatcgcgcaggagaatgctgcactgataggattaatgcagctagggccctcatctgatttcacgagcaggcatgtggtgaaagacatacctgtgaacttgctgctcgatggcgaggattgggagtttgagattcctgtgcaagctggcatgtccagcttcccttccagctggtctcgcgtccgtattcggcacctggagatgcactttgtgaaggaggccagcggtattggtggtgagattatccaccagcctaccacccagactgggaccgtttacatccttctgcagggttccactatcttccatgaccgcagaagagaccaggtgttgccttttcaggccgctgctccgctcaactaccattacgcgtaccgcctcgacaccggcgactccactctcacaaacgaaccctctgaacagtttgccaacaagttcatgcagatgacacccttcacccgttggaggcttcgtctgtctgcgtccgcaaaagagaatgcaggattagcctttcccacggctacagcacttgactccactacccagattgtcatcactttccatgttacggccatcagacaaattgactggcggcacgacgaagag

SEQ ID NO: 334 - protein, 867 aa, synthetic construct
  REGION 1..867: note = PtIP-83 polypeptide variant
MALVDYGKLFEDLNQISMGVLDRVEFSEVMVIHRMYVRLADLNVGQLEGAEKVKRLYVFADVVELPVVEWRWPPQIPGSVTVIILCRLLQWPTDGRQSDTELHLTFMKLHAIQREENRWEITAADGMNWGVYIHAEEVQVGVLTMSWSSVLRVSALRSVITSGFRAVSVFEVPGSVRSTLGATLRPDHALYSTTMQATPNASHISAFNLRIVSPSAYRVCPLQNDTDTYLGIPADVAAVLPVDVVTDPNILLGMQTTVHIAELVKACHPSPDVVSAVGEHLNWLNKLLLPLKESTQLQGSESYKECLALLGRVHAAMKMVRIGLVVPQLQYRMYGSLINQMAQVAQNYDREFKQFKLFIIQNQILGSYLLQQNRAFAERELQMESFHAAVISQRREELDNTFAKMDRLSGQMEAESSAMEQAKKEMDEGLRQFQNRQVANALFAVLSAVAQIGLAFLTAGATAPGAVASAGQAVSIAGQAAQGLRRVVEILEQLEAVMEVVAAVKDLVDSLEQVGQIVDAPVMPELPSEADWSIFVNEVEAVAEGMPTEVSEVPVWHARCKSVAALGREMSITAVQMSELQYDIWVQGMMRDMARSQADRLAAIQPADLTNYLEMATQMDMRTTRMLLGLLNILRIQNAALRYEYLLMPTELTTWPLGMDTVGDLLIAQENAALIGLMQLGPSSDFTSRHVVKDIPVNLLLDGEDWEFEIPVQAGMSSFPSSWSRVRIRHLEMHFVKEASGIGGEIIHQPTTQTGTVYILLQGSTIFHDRRRDQVLPFQAAAPLNYHYAYRLDTGDSTLTNEPSEQFANKFMQMTPFTRWRLRLSASAKENAGLAFPTATALDSTTQIVITFHVTAIRQIDWRHDEE

SEQ ID NO: 335 - protein, 867 aa, synthetic construct
  REGION 1..867: note = PtIP-83 polypeptide variant
MALVDYGKLFEDLNQISMGVLDRVEFSEVMVIHRMYVRLADLNVGQLEGAEKVKRLYVFADVVELPVVEWRWPPQIPGSVTVIILCRLLQWPTDGRQSDTELHLTFMKLHAIQREENRWEITAADGMNWGVYIHAEEVQVGVLTMSWSSVLRVSALRSVITSGFRAVSVFEVPGSVRSTLGATLRPDHALYSTTMQATPNASHISAFNLRIVSPSAYRVCPLQNDTDTYLGIPADVAAVLPVDVVTDPNILLGMQTTVHIAELVKACHPSPDVVSAVGEHLNWLNKLLLPLKESTQLQGSESYKECLALLGRVHAAMKMVRIGLVVPQLQYRMYGSLINQMAQVAQNYDREFKQFKLFIIQNQILGSYLLQQNRAFAERELQMESFHAAVISQRREELDNTFAKMDRLSGQMEAESSAMEQAKKEMDEGLRQFQNRQVANALFAVLSAVAQIGLAFLTAGATAPGAVASAGQAVSIAGQAAQGLRRVVEILEQLEAVMEVVAAVKDLVDSLEQVGQIVDAPVMPELPSEADWSIFVNEVEAVAEGMPTEVSEVPVWHGKCKNVAALGREMSITAVQMSELQYDIWVQGMMRDMARSQADRLAAIQPADLTNYLEMATQMDMRTTRMLLGLLNILRIQNAALRYEYLLMPTELTTWPLGMDTVGDLLIAQENAALIGLMQLGPSSDFTSRHVVKDIPVNLLLDGEDWEFEIPVQAGMSSFPSSWSRVRIRHLEMHFVKEASGIGGEIIHQPTTQTGTVYILLQGSTIFHDRRRDQVLPFQAAAPLNYHYAYRLDTGDSTLTNEPSEQFANKFMQMTPFTRWRLRLSASAKENAGLAFPTATALDSTTQIVITFHVTAIRQIDWRHDEE

SEQ ID NO: 336 - protein, 867 aa, synthetic construct
  REGION 1..867: note = PtIP-83 polypeptide variant
MALVDYGKLFEDLNQISMGVLDRVEFSEVMVIHRMYVRLADLNVGQLEGAEKVKRLYVFADVVELPVVEWRWPPQIPGSVTVIILCRLLQWPTDGRQSDTELHLTFMKLHAIQREENRWEITAADGMNWGVYIHAEEVQVGVLTMSWSSVLRVSALRSVITSGFRAVSVFEVPGSVRSTLGATLRPDHALYSTTMQATPNASHISAFNLRIVSPSAYRVCPLQNDTDTYLGIPADVAAVLPVDVVTDPNILLGMQTTVHIAELVKACHPSPDVVSAVGEHLNWLNKLLLPLKESTQLQGSESYKECLALLGRVHAAMKMVRIGLVVPQLQYRMYGSLINQMAQVAQNYDREFKQFKLFIIQNQILGSYLLQQNRAFAERELQMESFHAAVISQRREELDNTFAKMDRLSGQMEAESSAMEQAKKEMDEGLRQFQNRQVANALFAVLSAVAQIGLAFLTAGATAPGAVASAGQAVSIAGQAAQGLRRVVEILEQLEAVMEVVAAVKDLVDSLEQVGQIVDAPVMPELPSEADWSIFVNEVEAVAEGMPTEVSEVPVWIAKCKCVAALGREMSITAVQMSELQYDIWVQGMMRDMARSQADRLAAIQPADLTNYLEMATQMDMRTTRMLLGLLNILRIQNAALRYEYLLMPTELTTWPLGMDTVGDLLIAQENAALIGLMQLGPSSDFTSRHVVKDIPVNLLLDGEDWEFEIPVQAGMSSFPSSWSRVRIRHLEMHFVKEASGIGGEIIHQPTTQTGTVYILLQGSTIFHDRRRDQVLPFQAAAPLNYHYAYRLDTGDSTLTNEPSEQFANKFMQMTPFTRWRLRLSASAKENAGLAFPTATALDSTTQIVITFHVTAIRQIDWRHDEE

SEQ ID NO: 337 - protein, 867 aa, synthetic construct
  REGION 1..867: note = PtIP-83 polypeptide variant
MALVDYGKLFEDLNQISMGVLDRVEFSEVMVIHRMYVRLADLNVGQLEGAEKVKRLYVFADVVELPVVEWRWPPQIPGSVTVIILCRLLQWPTDGRQSDTELHLTFMKLHAIQREENRWEITAADGMNWGVYIHAEEVQVGVLTMSWSSVLRVSALRSVITSGFRAVSVFEVPGSVRSTLGATLRPDHALYSTTMQATPNASHISAFNLRIVSPSAYRVCPLQNDTDTYLGIPADVAAVLPVDVVTDPNILLGMQTTVHIAELVKACHPSPDVVSAVGEHLNWLNKLLLPLKESTQLQGSESYKECLALLGRVHAAMKMVRIGLVVPQLQYRMYGSLINQMAQVAQNYDREFKQFKLFIIQNQILGSYLLQQNRAFAERELQMESFHAAVISQRREELDNTFAKMDRLSGQMEAESSAMEQAKKEMDEGLRQFQNRQVANALFAVLSAVAQIGLAFLTAGATAPGAVASAGQAVSIAGQAAQGLRRVVEILEQLEAVMEVVAAVKDLVDSLEQVGQIVDAPVMPELPSEADWSIFVNEVEAVAEGMPTEVSEVPVWIAKCKSVAALGREMSITAVQMSELQYDIWVQGMMRDMARSQADRLAAIQPADLTNYLEMATQMDMRTTRMLLGLLNILRIQNAALRYEYLLMPTELTTWPLGMDTVGDLLIAQENAALIGLMQLGPSSDFTSRHVVKDIPVNLLLDGEDWEFEIPVQAGMSSFPSSWSRVRIRHLEMHFVKEASGIGGEIIHQPTTQTGTVYILLQGSTIFHDRRRDQVLPFQAAAPLNYHYAYRLDTGDSTLTNEPSEQFANKFMQMTPFTRWRLRLSASAKENAGLAFPTATALDSTTQIVITFHVTAIRQIDWRHDEE

SEQ ID NO: 338 - protein, 867 aa, synthetic construct
  REGION 1..867: note = PtIP-83 polypeptide variant
MALVDYGKLFEDLNQISMGVLDRVEFSEVMVIHRMYVRLADLNVGQLEGAEKVKRLYVFADVVELPVVEWRWPPQIPGSVTVIILCRLLQWPTDGRQSDTELHLTFMKLHAIQREENRWEITAADGMNWGVYIHAEEVQVGVLTMSWSSVLRVSALRSVITSGFRAVSVFEVPGSVRSTLGATLRPDHALYSTTMQATPNASHISAFNLRIVSPSAYRVCPLQNDTDTYLGIPADVAAVLPVDVVTDPNILLGMQTTVHIAELVKACHPSPDVVSAVGEHLNWLNKLLLPLKESTQLQGSESYKECLALLGRVHAAMKMVRIGLVVPQLQYRMYGSLINQMAQVAQNYDREFKQFKLFIIQNQILGSYLLQQNRAFAERELQMESFHAAVISQRREELDNTFAKMDRLSGQMEAESSAMEQAKKEMDEGLRQFQNRQVANALFAVLSAVAQIGLAFLTAGATAPGAVASAGQAVSIAGQAAQGLRRVVEILEQLEAVMEVVAAVKDLVDSLEQVGQIVDAPVMPELPSEADWSIFVNEVEAVAEGMPTEVSEVPVWIGKCKNVAALGREMSITAVQMSELQYDIWVQGMMRDMARSQADRLAAIQPADLTNYLEMATQMDMRTTRMLLGLLNILRIQNAALRYEYLLMPTELTTWPLGMDTVGDLLIAQENAALIGLMQLGPSSDFTSRHVVKDIPVNLLLDGEDWEFEIPVQAGMSSFPSSWSRVRIRHLEMHFVKEASGIGGEIIHQPTTQTGTVYILLQGSTIFHDRRRDQVLPFQAAAPLNYHYAYRLDTGDSTLTNEPSEQFANKFMQMTPFTRWRLRLSASAKENAGLAFPTATALDSTTQIVITFHVTAIRQIDWRHDEE

SEQ ID NO: 339 - protein, 867 aa, synthetic construct
  REGION 1..867: note = PtIP-83 polypeptide variant
MALVDYGKLFEDLNQISMGVLDRVEFSEVMVIHRMYVRLADLNVGQLEGAEKVKRLYVFADVVELPVVEWRWPPQIPGSVTVIILCRLLQWPTDGRQSDTELHLTFMKLHAIQREENRWEITAADGMNWGVYIHAEEVQVGVLTMSWSSVLRVSALRSVITSGFRAVSVFEVPGSVRSTLGATLRPDHALYSTTMQATPNASHISAFNLRIVSPSAYRVCPLQNDTDTYLGIPADVAAVLPVDVVTDPNILLGMQTTVHIAELVKACHPSPDVVSAVGEHLNWLNKLLLPLKESTQLQGSESYKECLALLGRVHAAMKMVRIGLVVPQLQYRMYGSLINQMAQVAQNYDREFKQFKLFIIQNQILGSYLLQQNRAFAERELQMESFHAAVISQRREELDNTFAKMDRLSGQMEAESSAMEQAKKEMDEGLRQFQNRQVANALFAVLSAVAQIGLAFLTAGATAPGAVASAGQAVSIAGQAAQGLRRVVEILEQLEAVMEVVAAVKDLVDSLEQVGQIVDAPVMPELPSEADWSIFVNEVEAVAEGMPTEVSEVPVWIGKCKSVAALGREMSITAVQMSELQYDIWVQGMMRDMARSQADRLAAIQPADLTNYLEMATQMDMRTTRMLLGLLNILRIQNAALRYEYLLMPTELTTWPLGMDTVGDLLIAQENAALIGLMQLGPSSDFTSRHVVKDIPVNLLLDGEDWEFEIPVQAGMSSFPSSWSRVRIRHLEMHFVKEASGIGGEIIHQPTTQTGTVYILLQGSTIFHDRRRDQVLPFQAAAPLNYHYAYRLDTGDSTLTNEPSEQFANKFMQMTPFTRWRLRLSASAKENAGLAFPTATALDSTTQIVITFHVTAIRQIDWRHDEE

SEQ ID NO: 340 - protein, 867 aa, synthetic construct
  REGION 1..867: note = PtIP-83 polypeptide variant
MALVDYGKLFEDLNQISMGVLDRVEFSEVMVIHRMYVRLADLNVGQLEGAEKVKRLYVFADVVELPVVEWRWPPQIPGSVTVIILCRLLQWPTDGRQSDTELHLTFMKLHAIQREENRWEITAADGMNWGVYIHAEEVQVGVLTMSWSSVLRVSALRSVITSGFRAVSVFEVPGSVRSTLGATLRPDHALYSTTMQATPNASHISAFNLRIVSPSAYRVCPLQNDTDTYLGIPADVAAVLPVDVVTDPNILLGMQTTVHIAELVKACHPSPDVVSAVGEHLNWLNKLLLPLKESTQLQGSESYKECLALLGRVHAAMKMVRIGLVVPQLQYRMYGSLINQMAQVAQNYDREFKQFKLFIIQNQILGSYLLQQNRAFAERELQMESFHAAVISQRREELDNTFAKMDRLSGQMEAESSAMEQAKKEMDEGLRQFQNRQVANALFAVLSAVAQIGLAFLTAGATAPGAVASAGQAVSIAGQAAQGLRRVVEILEQLEAVMEVVAAVKDLVDSLEQVGQIVDAPVMPELPSEADWSIFVNEVEAVAEGMPTEVSEVPVWIGKCNNVAALGREMSITAVQMSELQYDIWVQGMMRDMARSQADRLAAIQPADLTNYLEMATQMDMRTTRMLLGLLNILRIQNAALRYEYLLMPTELTTWPLGMDTVGDLLIAQENAALIGLMQLGPSSDFTSRHVVKDIPVNLLLDGEDWEFEIPVQAGMSSFPSSWSRVRIRHLEMHFVKEASGIGGEIIHQPTTQTGTVYILLQGSTIFHDRRRDQVLPFQAAAPLNYHYAYRLDTGDSTLTNEPSEQFANKFMQMTPFTRWRLRLSASAKENAGLAFPTATALDSTTQIVITFHVTAIRQIDWRHDEE

SEQ ID NO: 341 - protein, 867 aa, synthetic construct
  REGION 1..867: note = PtIP-83 polypeptide variant
MALVDYGKLFEDLNQISMGVLDRVEFSEVMVIHRMYVRLADLNVGQLEGAEKVKRLYVFADVVELPVVEWRWPPQIPGSVTVIILCRLLQWPTDGRQSDTELHLTFMKLHAIQREENRWEITAADGMNWGVYIHAEEVQVGVLTMSWSSVLRVSALRSVITSGFRAVSVFEVPGSVRSTLGATLRPDHALYSTTMQATPNASHISAFNLRIVSPSAYRVCPLQNDTDTYLGIPADVAAVLPVDVVTDPNILLGMQTTVHIAELVKACHPSPDVVSAVGEHLNWLNKLLLPLKESTQLQGSESYKECLALLGRVHAAMKMVRIGLVVPQLQYRMYGSLINQMAQVAQNYDREFKQFKLFIIQNQILGSYLLQQNRAFAERELQMESFHAAVISQRREELDNTFAKMDRLSGQMEAESSAMEQAKKEMDEGLRQFQNRQVANALFAVLSAVAQIGLAFLTAGATAPGAVASAGQAVSIAGQAAQGLRRVVEILEQLEAVMEVVAAVKDLVDSLEQVGQIVDAPVMPELPSEADWSIFVNEVEAVAEGMPTEVSEVPVWIVKCKSVAALGREMSITAVQMSELQYDIWVQGMMRDMARSQADRLAAIQPADLTNYLEMATQMDMRTTRMLLGLLNILRIQNAALRYEYLLMPTELTTWPLGMDTVGDLLIAQENAALIGLMQLGPSSDFTSRHVVKDIPVNLLLDGEDWEFEIPVQAGMSSFPSSWSRVRIRHLEMHFVKEASGIGGEIIHQPTTQTGTVYILLQGSTIFHDRRRDQVLPFQAAAPLNYHYAYRLDTGDSTLTNEPSEQFANKFMQMTPFTRWRLRLSASAKENAGLAFPTATALDSTTQIVITFHVTAIRQIDWRHDEE

SEQ ID NO: 342 - protein, 867 aa, synthetic construct
  REGION 1..867: note = PtIP-83 polypeptide variant
MALVDYGKLFEDLNQISMGVLDRVEFSEVMVIHRMYVRLADLNVGQLEGAEKVKRLYVFADVVELPVVEWRWPPQIPGSVTVIILCRLLQWPTDGRQSDTELHLTFMKLHAIQREENRWEITAADGMNWGVYIHAEEVQVGVLTMSWSSVLRVSALRSVITSGFRAVSVFEVPGSVRSTLGATLRPDHALYSTTMQATPNASHISAFNLRIVSPSAYRVCPLQNDTDTYLGIPADVAAVLPVDVVTDPNILLGMQTTVHIAELVKACHPSPDVVSAVGEHLNWLNKLLLPLKESTQLQGSESYKECLALLGRVHAAMKMVRIGLVVPQLQYRMYGSLINQMAQVAQNYDREFKQFKLFIIQNQILGSYLLQQNRAFAERELQMESFHAAVISQRREELDNTFAKMDRLSGQMEAESSAMEQAKKEMDEGLRQFQNRQVANALFAVLSAVAQIGLAFLTAGATAPGAVASAGQAVSIAGQAAQGLRRVVEILEQLEAVMEVVAAVKDLVDSLEQVGQIVDAPVMPELPSEADWSIFVNEVEAVAEGMPTEVSEVPVWLARCKNVAALGREMSITAVQMSELQYDIWVQGMMRDMARSQADRLAAIQPADLTNYLEMATQMDMRTTRMLLGLLNILRIQNAALRYEYLLMPTELTTWPLGMDTVGDLLIAQENAALIGLMQLGPSSDFTSRHVVKDIPVNLLLDGEDWEFEIPVQAGMSSFPSSWSRVRIRHLEMHFVKEASGIGGEIIHQPTTQTGTVYILLQGSTIFHDRRRDQVLPFQAAAPLNYHYAYRLDTGDSTLTNEPSEQFANKFMQMTPFTRWRLRLSASAKENAGLAFPTATALDSTTQIVITFHVTAIRQIDWRHDEE

SEQ ID NO: 343 - protein, 867 aa, synthetic construct
  REGION 1..867: note = PtIP-83 polypeptide variant
MALVDYGKLFEDLNQISMGVLDRVEFSEVMVIHRMYVRLADLNVGQLEGAEKVKRLYVFADVVELPVVEWRWPPQIPGSVTVIILCRLLQWPTDGRQSDTELHLTFMKLHAIQREENRWEITAADGMNWGVYIHAEEVQVGVLTMSWSSVLRVSALRSVITSGFRAVSVFEVPGSVRSTLGATLRPDHALYSTTMQATPNASHISAFNLRIVSPSAYRVCPLQNDTDTYLGIPADVAAVLPVDVVTDPNILLGMQTTVHIAELVKACHPSPDVVSAVGEHLNWLNKLLLPLKESTQLQGSESYKECLALLGRVHAAMKMVRIGLVVPQLQYRMYGSLINQMAQVAQNYDREFKQFKLFIIQNQILGSYLLQQNRAFAERELQMESFHAAVISQRREELDNTFAKMDRLSGQMEAESSAMEQAKKEMDEGLRQFQNRQVANALFAVLSAVAQIGLAFLTAGATAPGAVASAGQAVSIAGQAAQGLRRVVEILEQLEAVMEVVAAVKDLVDSLEQVGQIVDAPVMPELPSEADWSIFVNEVEAVAEGMPTEVSEVPVWLARCKSVAALGREMSITAVQMSELQYDIWVQGMMRDMARSQADRLAAIQPADLTNYLEMATQMDMRTTRMLLGLLNILRIQNAALRYEYLLMPTELTTWPLGMDTVGDLLIAQENAALIGLMQLGPSSDFTSRHVVKDIPVNLLLDGEDWEFEIPVQAGMSSFPSSWSRVRIRHLEMHFVKEASGIGGEIIHQPTTQTGTVYILLQGSTIFHDRRRDQVLPFQAAAPLNYHYAYRLDTGDSTLTNEPSEQFANKFMQMTPFTRWRLRLSASAKENAGLAFPTATALDSTTQIVITFHVTAIRQIDWRHDEE

SEQ ID NO: 344 - protein, 867 aa, synthetic construct
  REGION 1..867: note = PtIP-83 polypeptide variant
MALVDYGKLFEDLNQISMGVLDRVEFSEVMVIHRMYVRLADLNVGQLEGAEKVKRLYVFADVVELPVVEWRWPPQIPGSVTVIILCRLLQWPTDGRQSDTELHLTFMKLHAIQREENRWEITAADGMNWGVYIHAEEVQVGVLTMSWSSVLRVSALRSVITSGFRAVSVFEVPGSVRSTLGATLRPDHALYSTTMQATPNASHISAFNLRIVSPSAYRVCPLQNDTDTYLGIPADVAAVLPVDVVTDPNILLGMQTTVHIAELVKACHPSPDVVSAVGEHLNWLNKLLLPLKESTQLQGSESYKECLALLGRVHAAMKMVRIGLVVPQLQYRMYGSLINQMAQVAQNYDREFKQFKLFIIQNQILGSYLLQQNRAFAERELQMESFHAAVISQRREELDNTFAKMDRLSGQMEAESSAMEQAKKEMDEGLRQFQNRQVANALFAVLSAVAQIGLAFLTAGATAPGAVASAGQAVSIAGQAAQGLRRVVEILEQLEAVMEVVAAVKDLVDSLEQVGQIVDAPVMPELPSEADWSIFVNEVEAVAEGMPTEVSEVPVWLGRCKNVAALGREMSITAVQMSELQYDIWVQGMMRDMARSQADRLAAIQPADLTNYLEMATQMDMRTTRMLLGLLNILRIQNAALRYEYLLMPTELTTWPLGMDTVGDLLIAQENAALIGLMQLGPSSDFTSRHVVKDIPVNLLLDGEDWEFEIPVQAGMSSFPSSWSRVRIRHLEMHFVKEASGIGGEIIHQPTTQTGTVYILLQGSTIFHDRRRDQVLPFQAAAPLNYHYAYRLDTGDSTLTNEPSEQFANKFMQMTPFTRWRLRLSASAKENAGLAFPTATALDSTTQIVITFHVTAIRQIDWRHDEE

SEQ ID NO: 345 - protein, 867 aa, synthetic construct
  REGION 1..867: note = PtIP-83 polypeptide variant
MALVDYGKLFEDLNQISMGVLDRVEFSEVMVIHRMYVRLADLNVGQLEGAEKVKRLYVFADVVELPVVEWRWPPQIPGSVTVIILCRLLQWPTDGRQSDTELHLTFMKLHAIQREENRWEITAADGMNWGVYIHAEEVQVGVLTMSWSSVLRVSALRSVITSGFRAVSVFEVPGSVRSTLGATLRPDHALYSTTMQATPNASHISAFNLRIVSPSAYRVCPLQNDTDTYLGIPADVAAVLPVDVVTDPNILLGMQTTVHIAELVKACHPSPDVVSAVGEHLNWLNKLLLPLKESTQLQGSESYKECLALLGRVHAAMKMVRIGLVVPQLQYRMYGSLINQMAQVAQNYDREFKQFKLFIIQNQILGSYLLQQNRAFAERELQMESFHAAVISQRREELDNTFAKMDRLSGQMEAESSAMEQAKKEMDEGLRQFQNRQVANALFAVLSAVAQIGLAFLTAGATAPGAVASAGQAVSIAGQAAQGLRRVVEILEQLEAVMEVVAAVKDLVDSLEQVGQIVDAPVMPELPSEADWSIFVNEVEAVAEGMPTEVSEVPVWLGRCKSVAALGREMSITAVQMSELQYDIWVQGMMRDMARSQADRLAAIQPADLTNYLEMATQMDMRTTRMLLGLLNILRIQNAALRYEYLLMPTELTTWPLGMDTVGDLLIAQENAALIGLMQLGPSSDFTSRHVVKDIPVNLLLDGEDWEFEIPVQAGMSSFPSSWSRVRIRHLEMHFVKEASGIGGEIIHQPTTQTGTVYILLQGSTIFHDRRRDQVLPFQAAAPLNYHYAYRLDTGDSTLTNEPSEQFANKFMQMTPFTRWRLRLSASAKENAGLAFPTATALDSTTQIVITFHVTAIRQIDWRHDEE

SEQ ID NO: 346 - protein, 867 aa, synthetic construct
  REGION 1..867: note = PtIP-83 polypeptide variant
MALVDYGKLFEDLNQISMGVLDRVEFSEVMVIHRMYVRLADLNVGQLEGAEKVKRLYVFADVVELPVVEWRWPPQIPGSVTVIILCRLLQWPTDGRQSDTELHLTFMKLHAIQREENRWEITAADGMNWGVYIHAEEVQVGVLTMSWSSVLRVSALRSVITSGFRAVSVFEVPGSVRSTLGATLRPDHALYSTTMQATPNASHISAFNLRIVSPSAYRVCPLQNDTDTYLGIPADVAAVLPVDVVTDPNILLGMQTTVHIAELVKACHPSPDVVSAVGEHLNWLNKLLLPLKESTQLQGSESYKECLALLGRVHAAMKMVRIGLVVPQLQYRMYGSLINQMAQVAQNYDREFKQFKLFIIQNQILGSYLLQQNRAFAERELQMESFHAAVISQRREELDNTFAKMDRLSGQMEAESSAMEQAKKEMDEGLRQFQNRQVANALFAVLSAVAQIGLAFLTAGATAPGAVASAGQAVSIAGQAAQGLRRVVEILEQLEAVMEVVAAVKDLVDSLEQVGQIVDAPVMPELPSEADWSIFVNEVEAVAEGMPTEVSEVPVWLVKCKCVAALGREMSITAVQMSELQYDIWVQGMMRDMARSQADRLAAIQPADLTNYLEMATQMDMRTTRMLLGLLNILRIQNAALRYEYLLMPTELTTWPLGMDTVGDLLIAQENAALIGLMQLGPSSDFTSRHVVKDIPVNLLLDGEDWEFEIPVQAGMSSFPSSWSRVRIRHLEMHFVKEASGIGGEIIHQPTTQTGTVYILLQGSTIFHDRRRDQVLPFQAAAPLNYHYAYRLDTGDSTLTNEPSEQFANKFMQMTPFTRWRLRLSASAKENAGLAFPTATALDSTTQIVITFHVTAIRQIDWRHDEE

SEQ ID NO: 347 - protein, 867 aa, synthetic construct
  REGION 1..867: note = PtIP-83 polypeptide variant
MALVDYGKLFEDLNQISMGVLDRVEFSEVMVIHRMYVRLADLNVGQLEGAEKVKRLYVFADVVELPVVEWRWPPQIPGSVTVIILCRLLQWPTDGRQSDTELHLTFMKLHAIQREENRWEITAADGMNWGVYIHAEEVQVGVLTMSWSSVLRVSALRSVITSGFRAVSVFEVPGSVRSTLGATLRPDHALYSTTMQATPNASHISAFNLRIVSPSAYRVCPLQNDTDTYLGIPADVAAVLPVDVVTDPNILLGMQTTVHIAELVKACHPSPDVVSAVGEHLNWLNKLLLPLKESTQLQGSESYKECLALLGRVHAAMKMVRIGLVVPQLQYRMYGSLINQMAQVAQNYDREFKQFKLFIIQNQILGSYLLQQNRAFAERELQMESFHAAVISQRREELDNTFAKMDRLSGQMEAESSAMEQAKKEMDEGLRQFQNRQVANALFAVLSAVAQIGLAFLTAGATAPGAVASAGQAVSIAGQAAQGLRRVVEILEQLEAVMEVVSAVKDLVDSLEQVGQIVDAPVMPELPSEADWSIFVNEVEAVAEGMPTEVSEVPVWMAKCKNVAALGREMSITAVQMSELQYDIWVQGMMRDMARSQADRLAAIQPADLTNYLEMATQMDMRTTRMLLGLLNILRIQNAALRYEYLLMPTELTTWPLGMDTVGDLLIAQENAALIGLMQLGPSSDFTSRHVVKDIPVNLLLDGEDWEFEIPVQAGMSSFPSSWSRVRIRHLEMHFVKEASGIGGEIIHQPTTQTGTVYILLQGSTIFHDRRRDQVLPFQAAAPLNYHYAYRLDTGDSTLTNEPSEQFANKFMQMTPFTRWRLRLSASAKENAGLAFPTATALDSTTQIVITFHVTAIRQIDWRHDEE

SEQ ID NO: 348 - protein, 867 aa, synthetic construct
  REGION 1..867: note = PtIP-83 polypeptide variant
MALVDYGKLFEDLNQISMGVLDRVEFSEVMVIHRMYVRLADLNVGQLEGAEKVKRLYVFADVVELPVVEWRWPPQIPGSVTVIILCRLLQWPTDGRQSDTELHLTFMKLHAIQREENRWEITAADGMNWGVYIHAEEVQVGVLTMSWSSVLRVSALRSVITSGFRAVSVFEVPGSVRSTLGATLRPDHALYSTTMQATPNASHISAFNLRIVSPSAYRVCPLQNDTDTYLGIPADVAAVLPVDVVTDPNILLGMQTTVHIAELVKACHPSPDVVSAVGEHLNWLNKLLLPLKESTQLQGSESYKECLALLGRVHAAMKMVRIGLVVPQLQYRMYGSLINQMAQVAQNYDREFKQFKLFIIQNQILGSYLLQQNRAFAERELQMESFHAAVISQRREELDNTFAKMDRLSGQMEAESSAMEQAKKEMDEGLRQFQNRQVANALFAVLSAVAQIGLAFLTAGATAPGAVASAGQAVSIAGQAAQGLRRVVEILEQLEAVMEVVAAVKDLVDSLEQVGQIVDAPVMPELPSEADWSIFVNEVEAVAEGMPTEVSEVPVWMGRCKSVAALGREMSITAVQMSELQYDIWVQGMMRDMARSQADRLAAIQPADLTNYLEMATQMDMRTTRMLLGLLNILRIQNAALRYEYLLMPTELTTWPLGMDTVGDLLIAQENAALIGLMQLGPSSDFTSRHVVKDIPVNLLLDGEDWEFEIPVQAGMSSFPSSWSRVRIRHLEMHFVKEASGIGGEIIHQPTTQTGTVYILLQGSTIFHDRRRDQVLPFQAAAPLNYHYAYRLDTGDSTLTNEPSEQFANKFMQMTPFTRWRLRLSASAKENAGLAFPTATALDSTTQIVITFHVTAIRQIDWRHDEE

SEQ ID NO: 349 - protein, 867 aa, synthetic construct
  REGION 1..867: note = PtIP-83 polypeptide variant
MALVDYGKLFEDLNQISMGVLDRVEFSEVMVIHRMYVRLADLNVGQLEGAEKVKRLYVFADVVELPVVEWRWPPQIPGSVTVIILCRLLQWPTDGRQSDTELHLTFMKLHAIQREENRWEITAADGMNWGVYIHAEEVQVGVLTMSWSSVLRVSALRSVITSGFRAVSVFEVPGSVRSTLGATLRPDHALYSTTMQATPNASHISAFNLRIVSPSAYRVCPLQNDTDTYLGIPADVAAVLPVDVVTDPNILLGMQTTVHIAELVKACHPSPDVVSAVGEHLNWLNKLLLPLKESTQLQGSESYKECLALLGRVHAAMKMVRIGLVVPQLQYRMYGSLINQMAQVAQNYDREFKQFKLFIIQNQILGSYLLQQNRAFAERELQMESFHAAVISQRREELDNTFAKMDRLSGQMEAESSAMEQAKKEMDEGLRQFQNRQVANALFAVLSAVAQIGLAFLTAGATAPGAVASAGQAVSIAGQAAQGLRRVVEILEQLEAVMEVVAAVKDLVDSLEQVGQIVDAPVMPELPSEADWSIFVNEVEAVAEGMPTEVSEVPVWMVKCKNVAALGREMSITAVQMSELQYDIWVQGMMRDMARSQADRLAAIQPADLTNYLEMATQMDMRTTRMLLGLLNILRIQNAALRYEYLLMPTELTTWPLGMDTVGDLLIAQENAALIGLMQLGPSSDFTSRHVVKDIPVNLLLDGEDWEFEIPVQAGMSSFPSSWSRVRIRHLEMHFVKEASGIGGEIIHQPTTQTGTVYILLQGSTIFHDRRRDQVLPFQAAAPLNYHYAYRLDTGDSTLTNEPSEQFANKFMQMTPFTRWRLRLSASAKENAGLAFPTATALDSTTQIVITFHVTAIRQIDWRHDEE

SEQ ID NO: 350 - protein, 867 aa, synthetic construct
  REGION 1..867: note = PtIP-83 polypeptide variant
MALVDYGKLFEDLNQISMGVLDRVEFSEVMVIHRMYVRLADLNVGQLEGAEKVKRLYVFADVVELPVVEWRWPPQIPGSVTVIILCRLLQWPTDGRQSDTELHLTFMKLHAIQREENRWEITAADGMNWGVYIHAEEVQVGVLTMSWSSVLRVSALRSVITSGFRAVSVFEVPGSVRSTLGATLRPDHALYSTTMQATPNASHISAFNLRIVSPSAYRVCPLQNDTDTYLGIPADVAAVLPVDVVTDPNILLGMQTTVHIAELVKACHPSPDVVSAVGEHLNWLNKLLLPLKESTQLQGSESYKECLALLGRVHAAMKMVRIGLVVPQLQYRMYGSLINQMAQVAQNYDREFKQFKLFIIQNQILGSYLLQQNRAFAERELQMESFHAAVISQRREELDNTFAKMDRLSGQMEAESSAMEQAKKEMDEGLRQFQNRQVANALFAVLSAVAQIGLAFLTAGATAPGAVASAGQAVSIAGQAAQGLRRVVEILEQLEAVMEVVAAVKDLVDSLEQVGQIVDAPVMPELPSEADWSIFVNEVEAVAEGMPTEVSEVPVWMVKCKSVAALGREMSITAVQMSELQYDIWVQGMMRDMARSQADRLAAIQPADLTNYLEMATQMDMRTTRMLLGLLNILRIQNAALRYEYLLMPTELTTWPLGMDTVGDLLIAQENAALIGLMQLGPSSDFTSRHVVKDIPVNLLLDGEDWEFEIPVQAGMSSFPSSWSRVRIRHLEMHFVKEASGIGGEIIHQPTTQTGTVYILLQGSTIFHDRRRDQVLPFQAAAPLNYHYAYRLDTGDSTLTNEPSEQFANKFMQMTPFTRWRLRLSASAKENAGLAFPTATALDSTTQIVITFHVTAIRQIDWRHDEE

SEQ ID NO: 351 - protein, 867 aa, synthetic construct
  REGION 1..867: note = PtIP-83 polypeptide variant
MALVDYGKLFEDLNQISMGVLDRVEFSEVMVIHRMYVRLADLNVGQLEGAEKVKRLYVFADVVELPVVEWRWPPQIPGSVTVIILCRLLQWPTDGRQSDTELHLTFMKLHAIQREENRWEITAADGMNWGVYIHAEEVQVGVLTMSWSSVLRVSALRSVITSGFRAVSVFEVPGSVRSTLGATLRPDHALYSTTMQATPNASHISAFNLRIVSPSAYRVCPLQNDTDTYLGIPADVAAVLPVDVVTDPNILLGMQTTVHIAELVKACHPSPDVVSAVGEHLNWLNKLLLPLKESTQLQGSESYKECLALLGRVHAAMKMVRIGLVVPQLQYRMYGSLINQMAQVAQNYDREFKQFKLFIIQNQILGSYLLQQNRAFAERELQMESFHAAVISQRREELDNTFAKMDRLSGQMEAESSAMEQAKKEMDEGLRQFQNRQVANALFAVLSAVAQIGLAFLTAGATAPGAVASAGQAVSIAGQAAQGLRRVVEILEQLEAVMEVVAAVKDLVDSLEQVGQIVDAPVMPELPSEADWSIFVNEVEAVAEGMPTEVSEVPVWMVRCKNVAALGREMSITAVQMSELQYDIWVQGMMRDMARSQADRLAAIQPADLTNYLEMATQMDMRTTRMLLGLLNILRIQNAALRYEYLLMPTELTTWPLGMDTVGDLLIAQENAALIGLMQLGPSSDFTSRHVVKDIPVNLLLDGEDWEFEIPVQAGMSSFPSSWSRVRIRHLEMHFVKEASGIGGEIIHQPTTQTGTVYILLQGSTIFHDRRRDQVLPFQAAAPLNYHYAYRLDTGDSTLTNEPSEQFANKFMQMTPFTRWRLRLSASAKENAGLAFPTATALDSTTQIVITFHVTAIRQIDWRHDEE

SEQ ID NO: 352 - protein, 867 aa, synthetic construct
  REGION 1..867: note = PtIP-83 polypeptide variant
MALVDYGKLFEDLNQISMGVLDRVEFSEVMVIHRMYVRLADLNVGQLEGAEKVKRLYVFADVVELPVVEWRWPPQIPGSVTVIILCRLLQWPTDGRQSDTELHLTFMKLHAIQREENRWEITAADGMNWGVYIHAEEVQVGVLTMSWSSVLRVSALRSVITSGFRAVSVFEVPGSVRSTLGATLRPDHALYSTTMQATPNASHISAFNLRIVSPSAYRVCPLQNDTDTYLGIPADVAAVLPVDVVTDPNILLGMQTTVHIAELVKACHPSPDVVSAVGEHLNWLNKLLLPLKESTQLQGSESYKECLALLGRVHAAMKMVRIGLVVPQLQYRMYGSLINQMAQVAQNYDREFKQFKLFIIQNQILGSYLLQQNRAFAERELQMESFHAAVISQRREELDNTFAKMDRLSGQMEAESSAMEQAKKEMDEGLRQFQNRQVANALFAVLSAVAQIGLAFLTAGATAPGAVASAGQAVSIAGQAAQGLRRVVEILEQLEAVMEVVAAVKDLVDSLEQVGQIVDAPVMPELPSEADWSIFVNEVEAVAEGMPTEVSEVPVWQARCKHVAALGREMSITAVQMSELQYDIWVQGMMRDMARSQADRLAAIQPADLTNYLEMATQMDMRTTRMLLGLLNILRIQNAALRYEYLLMPTELTTWPLGMDTVGDLLIAQENAALIGLMQLGPSSDFTSRHVVKDIPVNLLLDGEDWEFEIPVQAGMSSFPSSWSRVRIRHLEMHFVKEASGIGGEIIHQPTTQTGTVYILLQGSTIFHDRRRDQVLPFQAAAPLNYHYAYRLDTGDSTLTNEPSEQFANKFMQMTPFTRWRLRLSASAKENAGLAFPTATALDSTTQIVITFHVTAIRQIDWRHDEE

SEQ ID NO: 353 - protein, 867 aa, synthetic construct
  REGION 1..867: note = PtIP-83 polypeptide variant
MALVDYGKLFEDLNQISMGVLDRVEFSEVMVIHRMYVRLADLNVGQLEGAEKVKRLYVFADVVELPVVEWRWPPQIPGSVTVIILCRLLQWPTDGRQSDTELHLTFMKLHAIQREENRWEITAADGMNWGVYIHAEEVQVGVLTMSWSSVLRVSALRSVITSGFRAVSVFEVPGSVRSTLGATLRPDHALYSTTMQATPNASHISAFNLRIVSPSAYRVCPLQNDTDTYLGIPADVAAVLPVDVVTDPNILLGMQTTVHIAELVKACHPSPDVVSAVGEHLNWLNKLLLPLKESTQLQGSESYKECLALLGRVHAAMKMVRIGLVVPQLQYRMYGSLINQMAQVAQNYDREFKQFKLFIIQNQILGSYLLQQNRAFAERELQMESFHAAVISQRREELDNTFAKMDRLSGQMEAESSAMEQAKKEMDEGLRQFQNRQVANALFAVLSAVAQIGLAFLTAGATAPGAVASAGQAVSIAGQAAQGLRRVVEILEQLEAVMEVVAAVNDLVDSLEQVGQIVDAPVMPELPSEADWSIFVNEVEAVAEGMPTEVSEVPVWQARCKNVAALGREMSITAVQMSELQYDIWVQGMMRDMARSQADRLAAIQPADLTNYLEMATQMDMRTTRMLLGLLNILRIQNAALRYEYLLMPTELTTWPLGMDTVGDLLIAQENAALIGLMQLGPSSDFTSRHVVKDIPVNLLLDGEDWEFEIPVQAGMSSFPSSWSRVRIRHLEMHFVKEASGIGGEIIHQPTTQTGTVYILLQGSTIFHDRRRDQVLPFQAAAPLNYHYAYRLDTGDSTLTNEPSEQFANKFMQMTPFTRWRLRLSASAKENAGLAFPTATALDSTTQIVITFHVTAIRQIDWRHDEE

SEQ ID NO: 354 - protein, 867 aa, synthetic construct
  REGION 1..867: note = PtIP-83 polypeptide variant
MALVDYGKLFEDLNQISMGVLDRVEFSEVMVIHRMYVRLADLNVGQLEGAEKVKRLYVFADVVELPVVEWRWPPQIPGSVTVIILCRLLQWPTDGRQSDTELHLTFMKLHAIQREENRWEITAADGMNWGVYIHAEEVQVGVLTMSWSSVLRVSALRSVITSGFRAVSVFEVPGSVRSTLGATLRPDHALYSTTMQATPNASHISAFNLRIVSPSAYRVCPLQNDTDTYLGIPADVAAVLPVDVVTDPNILLGMQTTVHIAELVKACHPSPDVVSAVGEHLNWLNKLLLPLKESTQLQGSESYKECLALLGRVHAAMKMVRIGLVVPQLQYRMYGSLINQMAQVAQNYDREFKQFKLFIIQNQILGSYLLQQNRAFAERELQMESFHAAVISQRREELDNTFAKMDRLSGQMEAESSAMEQAKKEMDEGLRQFQNRQVANALFAVLSAVAQIGLAFLTAGATAPGAVASAGQAVSIAGQAAQGLRRVVEILEQLEAVMEVVAAVKDLVDSLEQVGQIVDAPVMPELPSEADWSIFVNEVEAVAEGMPTEVSEVPVWQGRCKNVAALGREMSITAVQMSELQYDIWVQGMMRDMARSQADRLAAIQPADLTNYLEMATQMDMRTTRMLLGLLNILRIQNAALRYEYLLMPTELTTWPLGMDTVGDLLIAQENAALIGLMQLGPSSDFTSRHVVKDIPVNLLLDGEDWEFEIPVQAGMSSFPSSWSRVRIRHLEMHFVKEASGIGGEIIHQPTTQTGTVYILLQGSTIFHDRRRDQVLPFQAAAPLNYHYAYRLDTGDSTLTNEPSEQFANKFMQMTPFTRWRLRLSASAKENAGLAFPTATALDSTTQIVITFHVTAIRQIDWRHDEE

SEQ ID NO: 355 - protein, 867 aa, synthetic construct
  REGION 1..867: note = PtIP-83 polypeptide variant
MALVDYGKLFEDLNQISMGVLDRVEFSEVMVIHRMYVRLADLNVGQLEGAEKVKRLYVFADVVELPVVEWRWPPQIPGSVTVIILCRLLQWPTDGRQSDTELHLTFMKLHAIQREENRWEITAADGMNWGVYIHAEEVQVGVLTMSWSSVLRVSALRSVITSGFRAVSVFEVPGSVRSTLGATLRPDHALYSTTMQATPNASHISAFNLRIVSPSAYRVCPLQNDTDTYLGIPADVAAVLPVDVVTDPNILLGMQTTVHIAELVKACHPSPDVVSAVGEHLNWLNKLLLPLKESTQLQGSESYKECLALLGRVHAAMKMVRIGLVVPQLQYRMYGSLINQMAQVAQNYDREFKQFKLFIIQNQILGSYLLQQNRAFAERELQMESFHAAVISQRREELDNTFAKMDRLSGQMEAESSAMEQAKKEMDEGLRQFQNRQVANALFAVLSAVAQIGLAFLTAGATAPGAVASAGQAVSIAGQAAQGLRRVVEILEQLEAVMEVVAAVKDLVDSLEQVGQIVDAPVMPELPSEADWSIFVNEVEAVAEGMPTEVSEVPVWQVRCKSVAALGREMSITAVQMSELQYDIWVQGMMRDMARSQADRLAAIQPADLTNYLEMATQMDMRTTRMLLGLLNILRIQNAALRYEYLLMPTELTTWPLGMDTVGDLLIAQENAALIGLMQLGPSSDFTSRHVVKDIPVNLLLDGEDWEFEIPVQAGMSSFPSSWSRVRIRHLEMHFVKEASGIGGEIIHQPTTQTGTVYILLQGSTIFHDRRRDQVLPFQAAAPLNYHYAYRLDTGDSTLTNEPSEQFANKFMQMTPFTRWRLRLSASAKENAGLAFPTATALDSTTQIVITFHVTAIRQIDWRHDEE

SEQ ID NO: 356 - protein, 867 aa, synthetic construct
  REGION 1..867: note = PtIP-83 polypeptide variant
MALVDYGKLFEDLNQISMGVLDRVEFSEVMVIHRMYVRLADLNVGQLEGAEKVKRLYVFADVVELPVVEWRWPPQIPGSVTVIILCRLLQWPTDGRQSDTELHLTFMKLHAIQREENRWEITAADGMNWGVYIHAEEVQVGVLTMSWSSVLRVSALRSVITSGFRAVSVFEVPGSVRSTLGATLRPDHALYSTTMQATPNASHISAFNLRIVSPSAYRVCPLQNDTDTYLGIPADVAAVLPVDVVTDPNILLGMQTTVHIAELVKACHPSPDVVSAVGEHLNWLNKLLLPLKESTQLQGSESYKECLALLGRVHAAMKMVRIGLVVPQLQYRMYGSLINQMAQVAQNYDREFKQFKLFIIQNQILGSYLLQQNRAFAERELQMESFHAAVISQRREELDNTFAKMDRLSGQMEAESSAMEQAKKEMDEGLRQFQNRQVANALFAVLSAVAQIGLAFLTAGATAPGAVASAGQAVSIAGQAAQGLRRVVEILEQLEAVMEVVAAVKDLVDSLEQVGQIVDAPVMPELPSEADWSIFVNEVEAVAEGMPTEVSEVPVWRARCKNVAALGREMSIAAVQMSELQYDIWVQGMMRDMARSQADRLAAIQPADLTNYLEMATQMDMRTTRMLLGLLNILRIQNAALRYEYLLMPTELTTWPLGMDTVGDLLIAQENAALIGLMQLGPSSDFTSRHVVKDIPVNLLLDGEDWEFEIPVQAGMSSFPSSWSRVRIRHLEMHFVKEASGIGGEIIHQPTTQTGTVYILLQGSTIFHDRRRDQVLPFQAAAPLNYHYAYRLDTGDSTLTNEPSEQFANKFMQMTPFTRWRLRLSASAKENAGLAFPTATALDSTTQIVITFHVTAIRQIDWRHDEE

SEQ ID NO: 357 - protein, 867 aa, synthetic construct
  REGION 1..867: note = PtIP-83 polypeptide variant
MALVDYGKLFEDLNQISMGVLDRVEFSEVMVIHRMYVRLADLNVGQLEGAEKVKRLYVFADVVELPVVEWRWPPQIPGSVTVIILCRLLQWPTDGRQSDTELHLTFMKLHAIQREENRWEITAADGMNWGVYIHAEEVQVGVLTMSWSSVLRVSALRSVITSGFRAVSVFEVPGSVRSTLGATLRPDHALYSTTMQATPNASHISAFNLRIVSPSAYRVCPLQNDTDTYLGIPADVAAVLPVDVVTDPNILLGMQTTVHIAELVKACHPSPDVVSAVGEHLNWLNKLLLPLKESTQLQGSESYKECLALLGRVHAAMKMVRIGLVVPQLQYRMYGSLINQMAQVAQNYDREFKQFKLFIIQNQILGSYLLQQNRAFAERELQMESFHAAVISQRREELDNTFAKMDRLSGQMEAESSAMEQAKKEMDEGLRQFQNRQVANALFAVLSAVAQIGLAFLTAGATAPGAVASAGQAVSIAGQAAQGLRRVVEILEQLEAVMEVVAAVKDLVDSLEQVGQIVDAPVMPELPSEADWSIFVNEVEAVAEGMPTEVSEVPVWRGKCKSVAALGREMSITAVQMSELQYDIWVQGMMRDMARSQADRLAAIQPADLTNYLEMATQMDMRTTRMLLGLLNILRIQNAALRYEYLLMPTELTTWPLGMDTVGDLLIAQENAALIGLMQLGPSSDFTSRHVVKDIPVNLLLDGEDWEFEIPVQAGMSSFPSSWSRVRIRHLEMHFVKEASGIGGEIIHQPTTQTGTVYILLQGSTIFHDRRRDQVLPFQAAAPLNYHYAYRLDTGDSTLTNEPSEQFANKFMQMTPFTRWRLRLSASAKENAGLAFPTATALDSTTQIVITFHVTAIRQIDWRHDEE

SEQ ID NO: 358 - protein, 867 aa, synthetic construct
  REGION 1..867: note = PtIP-83 polypeptide variant
MALVDYGKLFEDLNQISMGVLDRVEFSEVMVIHRMYVRLADLNVGQLEGAEKVKRLYVFADVVELPVVEWRWPPQIPGSVTVIILCRLLQWPTDGRQSDTELHLTFMKLHAIQREENRWEITAADGMNWGVYIHAEEVQVGVLTMSWSSVLRVSALRSVITSGFRAVSVFEVPGSVRSTLGATLRPDHALYSTTMQATPNASHISAFNLRIVSPSAYRVCPLQNDTDTYLGIPADVAAVLPVDVVTDPNILLGMQTTVHIAELVKACHPSPDVVSAVGEHLNWLNKLLLPLKESTQLQGSESYKECLALLGRVHAAMKMVRIGLVVPQLQYRMYGSLINQMAQVAQNYDREFKQFKLFIIQNQILGSYLLQQNRAFAERELQMESFHAAVISQRREELDNTFAKMDRLSGQMEAESSAMEQAKKEMDEGLRQFQNRQVANALFAVLSAVAQIGLAFLTAGATAPGAVASAGQAVSIAGQAAQGLRRVVEILEQLEAVMEVVAAVKDLVDSLEQVGQIVDAPVMPELPSEADWSIFVNEVEAVAEGMPTEVSEVPVWRGRCKTVAALGREMSITAVQMSELQYDIWVQGMMRDMARSQADRLAAIQPADLTNYLEMATQMDMRTTRMLLGLLNILRIQNAALRYEYLLMPTELTTWPLGMDTVGDLLIAQENAALIGLMQLGPSSDFTSRHVVKDIPVNLLLDGEDWEFEIPVQAGMSSFPSSWSRVRIRHLEMHFVKEASGIGGEIIHQPTTQTGTVYILLQGSTIFHDRRRDQVLPFQAAAPLNYHYAYRLDTGDSTLTNEPSEQFANKFMQMTPFTRWRLRLSASAKENAGLAFPTATALDSTTQIVITFHVTAIRQIDWRHDEE

SEQ ID NO: 359 - protein, 867 aa, synthetic construct
  REGION 1..867: note = PtIP-83 polypeptide variant
MALVDYGKLFEDLNQISMGVLDRVEFSEVMVIHRMYVRLADLNVGQLEGAEKVKRLYVFADVVELPVVEWRWPPQIPGSVTVIILCRLLQWPTDGRQSDTELHLTFMKLHAIQREENRWEITAADGMNWGVYIHAEEVQVGVLTMSWSSVLRVSALRSVITSGFRAVSVFEVPGSVRSTLGATLRPDHALYSTTMQATPNASHISAFNLRIVSPSAYRVCPLQNDTDTYLGIPADVAAVLPVDVVTDPNILLGMQTTVHIAELVKACHPSPDVVSAVGEHLNWLNKLLLPLKESTQLQGSESYKECLALLGRVHAAMKMVRIGLVVPQLQYRMYGSLINQMAQVAQNYDREFKQFKLFIIQNQILGSYLLQQNRAFAERELQMESFHAAVISQRREELDNTFAKMDRLSGQMEAESSAMEQAKKEMDEGLRQFQNRQVANALFAVLSAVAQIGLAFLTAGATAPGAVASAGQAVSIAGQAAQGLRRVVEILEQLEAVMEVVAAVKDLVDSLEQVGQIVDAPVMPELPSEADWSIFVNEVEAVAEGMPTEVSEVPVWSARCKSVAALGREMSITAVQMSELQYDIWVQGMMRDMARSQADRLAAIQPADLTNYLEMATQMDMRTTRMLLGLLNILRIQNAALRYEYLLMPTELTTWPLGMDTVGDLLIAQENAALIGLMQLGPSSDFTSRHVVKDIPVNLLLDGEDWEFEIPVQAGMSSFPSSWSRVRIRHLEMHFVKEASGIGGEIIHQPTTQTGTVYILLQGSTIFHDRRRDQVLPFQAAAPLNYHYAYRLDTGDSTLTNEPSEQFANKFMQMTPFTRWRLRLSASAKENAGLAFPTATALDSTTQIVITFHVTAIRQIDWRHDEE

SEQ ID NO: 360 - protein, 867 aa, synthetic construct
  REGION 1..867: note = PtIP-83 polypeptide variant
MALVDYGKLFEDLNQISMGVLDRVEFSEVMVIHRMYVRLADLNVGQLEGAEKVKRLYVFADVVELPVVEWRWPPQIPGSVTVIILCRLLQWPTDGRQSDTELHLTFMKLHAIQREENRWEITAADGMNWGVYIHAEEVQVGVLTMSWSSVLRVSALRSVITSGFRAVSVFEVPGSVRSTLGATLRPDHALYSTTMQATPNASHISAFNLRIVSPSAYRVCPLQNDTDTYLGIPADVAAVLPVDVVTDPNILLGMQTTVHIAELVKACHPSPDVVSAVGEHLNWLNKLLLPLKESTQLQGSESYKECLALLGRVHAAMKMVRIGLVVPQLQYRMYGSLINQMAQVAQNYDREFKQFKLFIIQNQILGSYLLQQNRAFAERELQMESFHAAVISQRREELDNTFAKMDRLSGQMEAESSAMEQAKKEMDEGLRQFQNRQVANALFAVLSAVAQIGLAFLTAGATAPGAVASAGQAVSIAGQAAQGLRRVVEILEQLEAVMEVVAAVKDLVDSLEQVGQIVDAPVMPELPSEADWSIFVNEVEAVAEGMPTEVSEVPVWSVKCKHVAALGREMSITAVQMSELQYDIWVQGMMRDMARSQADRLAAIQPADLTNYLEMATQMDMRTTRMLLGLLNILRIQNAALRYEYLLMPTELTTWPLGMDTVGDLLIAQENAALIGLMQLGPSSDFTSRHVVKDIPVNLLLDGEDWEFEIPVQAGMSSFPSSWSRVRIRHLEMHFVKEASGIGGEIIHQPTTQTGTVYILLQGSTIFHDRRRDQVLPFQAAAPLNYHYAYRLDTGDSTLTNEPSEQFANKFMQMTPFTRWRLRLSASAKENAGLAFPTATALDSTTQIVITFHVTAIRQIDWRHDEE

SEQ ID NO: 361 - protein, 867 aa, synthetic construct
  REGION 1..867: note = PtIP-83 polypeptide variant
MALVDYGKLFEDLNQISMGVLDRVEFSEVMVIHRMYVRLADLNVGQLEGAEKVKRLYVFADVVELPVVEWRWPPQIPGSVTVIILCRLLQWPTDGRQSDTELHLTFMKLHAIQREENRWEITAADGMNWGVYIHAEEVQVGVLTMSWSSVLRVSALRSVITSGFRAVSVFEVPGSVRSTLGATLRPDHALYSTTMQATPNASHISAFNLRIVSPSAYRVCPLQNDTDTYLGIPADVAAVLPVDVVTDPNILLGMQTTVHIAELVKACHPSPDVVSAVGEHLNWLNKLLLPLKESTQLQGSESYKECLALLGRVHAAMKMVRIGLVVPQLQYRMYGSLINQMAQVAQNYDREFKQFKLFIIQNQILGSYLLQQNRAFAERELQMESFHAAVISQRREELDNTFAKMDRLSGQMEAESSAMEQAKKEMDEGLRQFQNRQVANALFAVLSAVAQIGLAFLTAGATAPGAVASAGQAVSIAGQAAQGLRRVVEILEQLEAVMEVVAAVKDLVDSLEQVGQIVDAPVMPELPSEADWSIFVNEVEAVAEGMPTEVSEVPVWTGRCKTVAALGREMSITAVQMSELQYDIWVQGMMRDMARSQADRLAAIQPADLTNYLEMATQMDMRTTRMLLGLLNILRIQNAALRYEYLLMPTELTTWPLGMDTVGDLLIAQENAALIGLMQLGPSSDFTSRHVVKDIPVNLLLDGEDWEFEIPVQAGMSSFPSSWSRVRIRHLEMHFVKEASGIGGEIIHQPTTQTGTVYILLQGSTIFHDRRRDQVLPFQAAAPLNYHYAYRLDTGDSTLTNEPSEQFANKFMQMTPFTRWRLRLSASAKENAGLAFPTATALDSTTQIVITFHVTAIRQIDWRHDEE

SEQ ID NO: 362 - protein, 867 aa, synthetic construct
  REGION 1..867: note = PtIP-83 polypeptide variant
MALVDYGKLFEDLNQISMGVLDRVEFSEVMVIHRMYVRLADLNVGQLEGAEKVKRLYVFADVVELPVVEWRWPPQIPGSVTVIILCRLLQWPTDGRQSDTELHLTFMKLHAIQREENRWEITAADGMNWGVYIHAEEVQVGVLTMSWSSVLRVSALRSVITSGFRAVSVFEVPGSVRSTLGATLRPDHALYSTTMQATPNASHISAFNLRIVSPSAYRVCPLQNDTDTYLGIPADVAAVLPVDVVTDPNILLGMQTTVHIAELVKACHPSPDVVSAVGEHLNWLNKLLLPLKESTQLQGSESYKECLALLGRVHAAMKMVRIGLVVPQLQYRMYGSLINQMAQVAQNYDREFKQFKLFIIQNQILGSYLLQQNRAFAERELQMESFHAAVISQRREELDNTFAKMDRLSGQMEAESSAMEQAKKEMDEGLRQFQNRQVANALFAVLSAVAQIGLAFLTAGATAPGAVASAGQAVSIAGQAAQGLRRVVEILEQLEAVMEVVAAVKDLVDSLEQVGQIVDAPVMPELPSEADWSIFVNEVEAVAEGMPTEVSEVPVWTGRCNHVAALGQEMSITAVQMSELQYDIWVQGMMRDMARSQADRLAAIQPADLTNYLEMATQMDMRTTRMLLGLLNILRIQNAALRYEYLLMPTELTTWPLGMDTVGDLLIAQENAALIGLMQLGPSSDFTSRHVVKDIPVNLLLDGEDWEFEIPVQAGMSSFPSSWSRVRIRHLEMHFVKEASGIGGEIIHQPTTQTGTVYILLQGSTIFHDRRRDQVLPFQAAAPLNYHYAYRLDTGDSTLTNEPSEQFANKFMQMTPFTRWRLRLSASAKENAGLAFPTATALDSTTQIVITFHVTAIRQIDWRHDEE

SEQ ID NO: 363 - protein, 867 aa, synthetic construct
  REGION 1..867: note = PtIP-83 polypeptide variant
MALVDYGKLFEDLNQISMGVLDRVEFSEVMVIHRMYVRLADLNVGQLEGAEKVKRLYVFADVVELPVVEWRWPPQIPGSVTVIILCRLLQWPTDGRQSDTELHLTFMKLHAIQREENRWEITAADGMNWGVYIHAEEVQVGVLTMSWSSVLRVSALRSVITSGFRAVSVFEVPGSVRSTLGATLRPDHALYSTTMQATPNASHISAFNLRIVSPSAYRVCPLQNDTDTYLGIPADVAAVLPVDVVTDPNILLGMQTTVHIAELVKACHPSPDVVSAVGEHLNWLNKLLLPLKESTQLQGSESYKECLALLGRVHAAMKMVRIGLVVPQLQYRMYGSLINQMAQVAQNYDREFKQFKLFIIQNQILGSYLLQQNRAFAERELQMESFHAAVISQRREELDNTFAKMDRLSGQMEAESSAMEQAKKEMDEGLRQFQNRQVANALFAVLSAVAQIGLAFLTAGATAPGAVASAGQAVSIAGQAAQGLRRVVEILEQLEAVMEVVAAVKDLVDSLEQVGQIVDAPVMPELPSEADWSIFVNEVEAVAEGMPTEVSEVPVWTVKCKNVAALGREMSITAVQMSELQYDIWVQGMMRDMARSQADRLAAIQPADLTNYLEMATQMDMRTTRMLLGLLNILRIQNAALRYEYLLMPTELTTWPLGMDTVGDLLIAQENAALIGLMQLGPSSDFTSRHVVKDIPVNLLLDGEDWEFEIPVQAGMSSFPSSWSRVRIRHLEMHFVKEASGIGGEIIHQPTTQTGTVYILLQGSTIFHDRRRDQVLPFQAAAPLNYHYAYRLDTGDSTLTNEPSEQFANKFMQMTPFTRWRLRLSASAKENAGLAFPTATALDSTTQIVITFHVTAIRQIDWRHDEE

SEQ ID NO: 364 - protein, 867 aa, synthetic construct
  REGION 1..867: note = PtIP-83 polypeptide variant
MALVDYGKLFEDLNQISMGVLDRVEFSEVMVIHRMYVRLADLNVGQLEGAEKVKRLYVFADVVELPVVEWRWPPQIPGSVTVIILCRLLQWPTDGRQSDTELHLTFMKLHAIQREENRWEITAADGMNWGVYIHAEEVQVGVLTMSWSSVLRVSALRSVITSGFRAVSVFEVPGSVRSTLGATLRPDHALYSTTMQATPNASHISAFNLRIVSPSAYRVCPLQNDTDTYLGIPADVAAVLPVDVVTDPNILLGMQTTVHIAELVKACHPSPDVVSAVGEHLNWLNKLLLPLKESTQLQGSESYKECLALLGRVHAAMKMVRIGLVVPQLQYRMYGSLINQMAQVAQNYDREFKQFKLFIIQNQILGSYLLQQNRAFAERELQMESFHAAVISQRREELDNTFAKMDRLSGQMEAESSAMEQAKKEMDEGLRQFQNRQVANALFAVLSAVAQIGLAFLTAGATAPGAVASAGQAVSIAGQAAQGLRRVVEILEQLEAVMEVVAAVKDLVDSLEQVGQIVDAPVMPELPSEADWSIFVNEVEAVAEGMPTEVSEVPVWTVKCKSVAALGREMSITAVQMSELQYDIWVQGMMRDMARSQADRLAAIQPADLTNYLEMATQMDMRTTRMLLGLLNILRIQNAALRYEYLLMPTELTTWPLGMDTVGDLLIAQENAALIGLMQLGPSSDFTSRHVVKDIPVNLLLDGEDWEFEIPVQAGMSSFPSSWSRVRIRHLEMHFVKEASGIGGEIIHQPTTQTGTVYILLQGSTIFHDRRRDQVLPFQAAAPLNYHYAYRLDTGDSTLTNEPSEQFANKFMQMTPFTRWRLRLSASAKENAGLAFPTATALDSTTQIVITFHVTAIRQIDWRHDEE

SEQ ID NO: 365 - protein, 867 aa, synthetic construct
  REGION 1..867: note = PtIP-83 polypeptide variant
MALVDYGKLFEDLNQISMGVLDRVEFSEVMVIHRMYVRLADLNVGQLEGAEKVKRLYVFADVVELPVVEWRWPPQIPGSVTVIILCRLLQWPTDGRQSDTELHLTFMKLHAIQREENRWEITAADGMNWGVYIHAEEVQVGVLTMSWSSVLRVSALRSVITSGFRAVSVFEVPGSVRSTLGATLRPDHALYSTTMQATPNASHISAFNLRIVSPSAYRVCPLQNDTDTYLGIPADVAAVLPVDVVTDPNILLGMQTTVHIAELVKACHPSPDVVSAVGEHLNWLNKLLLPLKESTQLQGSESYKECLALLGRVHAAMKMVRIGLVVPQLQYRMYGSLINQMAQVAQNYDREFKQFKLFIIQNQILGSYLLQQNRAFAERELQMESFHAAVISQRREELDNTFAKMDRLSGQMEAESSAMEQAKKEMDEGLRQFQNRQVANALFAVLSAVAQIGLAFLTAGATAPGAVASAGQAVSIAGQAAQGLRRVVEILEQLEAVMEVVAAVKDLVDSLEQVGQIVDAPVMPELPSEADWSIFVNEVEAVAEGMPTEVSEVPVWTVRCKNVAALGREMSITAVQMSELQYDIWVQGMMRDMARSQADRLAAIQPADLTNYLEMATQMDMRTTRMLLGLLNILRIQNAALRYEYLLMPTELTTWPLGMDTVGDLLIAQENAALIGLMQLGPSSDFTSRHVVKDIPVNLLLDGEDWEFEIPVQAGMSSFPSSWSRVRIRHLEMHFVKEASGIGGEIIHQPTTQTGTVYILLQGSTIFHDRRRDQVLPFQAAAPLNYHYAYRLDTGDSTLTNEPSEQFANKFMQMTPFTRWRLRLSASAKENAGLAFPTATALDSTTQIVITFHVTAIRQIDWRHDEE

SEQ ID NO: 366 - protein, 867 aa, synthetic construct
  REGION 1..867: note = PtIP-83 polypeptide variant
MALVDYGKLFEDLNQISMGVLDRVEFSEVMVIHRMYVRLADLNVGQLEGAEKVKRLYVFADVVELPVVEWRWPPQIPGSVTVIILCRLLQWPTDGRQSDTELHLTFMKLHAIQREENRWEITAADGMNWGVYIHAEEVQVGVLTMSWSSVLRVSALRSVITSGFRAVSVFEVPGSVRSTLGATLRPDHALYSTTMQATPNASHISAFNLRIVSPSAYRVCPLQNDTDTYLGIPADVAAVLPVDVVTDPNILLGMQTTVHIAELVKACHPSPDVVSAVGEHLNWLNKLLLPLKESTQLQGSESYKECLALLGRVHAAMKMVRIGLVVPQLQYRMYGSLINQMAQVAQNYDREFKQFKLFIIQNQILGSYLLQQNRAFAERELQMESFHAAVISQRREELDNTFAKMDRLSGQMEAESSAMEQAKKEMDEGLRQFQNRQVANALFAVLSAVAQIGLAFLTAGATAPGAVASAGQAVSIAGQAAQGLRRVVEILEQLEAVMEVVAAVKDLVDSLEQVGQIVDAPVMPELPSEADWSIFVNEVEAVAEGMPTEVSEVPVWRARCKHVAALGREMSITAVQMSELQYDIWVQGMMRDMARSQADRLAAIQPADLTNYLEMATQMDMRTTRMLLGLLNILRIQNAALRYEYLLMPTELTTWPLGMDTVGDLLIAQENAALIGLMQLGPSSDFTSRHVVKDIPVNLLLDGEDWEFEIPVQAGMSSFPSSWSRVRIRHLEMHFVKEASGIGGEIIHQPTTQTGTVYILLQGSTIFHDRRRDQVLPFQAAAPLNYHYAYRLDTGDSTLTNEPSEQFANKFMQMTPFTRWRLRLSASAKENAGLAFPTATALDSTTQIVITFHVTAIRQIDWRHDEE

SEQ ID NO: 367 - protein, 867 aa, synthetic construct
  REGION 1..867: note = PtIP-83 polypeptide variant
MALVDYGKLFEDLNQISMGVLDRVEFSEVMVIHRMYVRLADLNVGQLEGAEKVKRLYVFADVVELPVVEWRWPPQIPGSVTVIILCRLLQWPTDGRQSDTELHLTFMKLHAIQREENRWEITAADGMNWGVYIHAEEVQVGVLTMSWSSVLRVSALRSVITSGFRAVSVFEVPGSVRSTLGATLRPDHALYSTTMQATPNASHISAFNLRIVSPSAYRVCPLQNDTDTYLGIPADVAAVLPVDVVTDPNILLGMQTTVHIAELVKACHPSPDVVSAVGEHLNWLNKLLLPLKESTQLQGSESYKECLALLGRVHAAMKMVRIGLVVPQLQYRMYGSLINQMAQVAQNYDREFKQFKLFIIQNQILGSYLLQQNRAFAERELQMESFHAAVISQRREELDNTFAKMDRLSGQMEAESSAMEQAKKEMDEGLRQFQNRQVANALFAVLSAVAQIGLAFLTAGATAPGAVASAGQAVSIAGQAAQGLRRVVEILEQLEAVMEVVAAVKDLVDSLEQVGQIVDAPVMPELPSEADWSIFVNEVEAVAEGMPTEVSEVPVWIGRCKSVAALGREMSITAVQMSELQYDIWVQGMMRDMARSQADRLAAIQPADLTNYLEMATQMDMRTTRMLLGLLNILRIQNAALRYEYLLMPTELTTWPLGMDTVGDLLIAQENAALIGLMQLGPSSDFTSRHVVKDIPVNLLLDGEDWEFEIPVQAGMSSFPSSWSRVRIRHLEMHFVKEASGIGGEIIHQPTTQTGTVYILLQGSTIFHDRRRDQVLPFQAAAPLNYHYAYRLDTGDSTLTNEPSEQFANKFMQMTPFTRWRLRLSASAKENAGLAFPTATALDSTTQIVITFHVTAIRQIDWRHDEE

SEQ ID NO: 368 - DNA, 2601 bp, synthetic construct
  misc_feature 1..2601: note = PtIP-83 polypeptide variant encoding polynucleotide
  source 1..2601: mol_type = other DNA
atggctctcgtggattacggcaagcttttcgaggatctgaaccagataagcatgggtgtactggatcgggtagagttttcagaggtgatggtgatccacaggatgtatgtgaggctagctgatctgaatgtggggcagctcgagggagccgagaaagtgaagcacttgtatatttttaccgacgttctcgagctaccagtcgtggaatggcggtggccgccgcaaataccaggatcggtgacggtgatcatattgtgtcgtcttcttcaatggccaactgatgggaggcagtcggacaccgagctccacctgacattcatgaagttgcatgccatacaacgagaggaaaatcggtgggagataaccgcagcagatggcatgaactggggagtttacatacacgcagaggaagtacaggttggcgtgctgacaatgtcatggtcttcggtacttagagtttcggcacttcgctctgttataacctccggctttcgcgccgttagtgtgtttgaggtaccgggaagtgtaaggtccacccttggagctactttaaggcccgatcacgccttatatagtacaactatgcaagccacacccaacgcatcgcatattagtgcttttaaccttcgcatagtttccccgtcggcatatcgtgtttgtcctctccaaaatgacacagatacctacttaggtattccagcagacgtggcggcagttcttccagtagacgtggtgactgatcctaacatcttgctgggcatgcagacaacggtacacattgcggagctagtcaaggcatgtcatccgtcacccgatgttgtgagcgctgtaggggagcacctgaactggctcaacaaactcttactcccacttaaggaatcgactcagttgcaaggaagcgagtcgtacaaggagtgccttgcactcttgggtcgtgttcacgctgcgatgaagatggtgagaattggcttagtagtgccccagctgcaatacagaatgtacggtagcctcatcaaccaaatggcccaagtagcacaaaactacgaccgagaattcaagcaattcaaattattcatcatccaaaatcaaatccttggcagctatttgctgcagcagaacagggcatttgctgagagggagctgcagatggagagctttcatgctgctgtcatttctcaaagaagggaggagttggacaatacattcgcaaagatggaccgattgagcgggcaaatggaggcagagagtagtgcaatggagcaagccaaaaaggaaatggacgaaggattgaggcagttccagaataggcaagttgcgaacgccctctttgccgttcttagcgctgtagctcagattgggcttgcattccttacggctggtgcaacggctcctggagctgtggcgtcggcggggcaagctgtgagcatagcaggtcaggcggcgcaaggtctgcgaagggtggtggaaattctagagcagctggaggctgtgatggaggttgtggctgctgtgaaggacctcgtggattcattggaacaggtaggtcagattgtggacgcaccggtgatgccggaattgccctcagaggcggactggttcatttttgtgaacgaggtggaggccgtggcagagggcatgccaacggaagtctcggaggttccggtgtggcacggcaagtgcaagaatgtggctgcactgggtcgggagatgagcatcacggcagtacagatgtcggagctgcagtatgacatctgggtgcaaggcatgatgcgggatatggctcgaagccaggcagacaggctggccgcaattcaacccgcggaccttaccaactatttggagatggctacccagatggatatgcggactacgaggatgctgctggggctcctcaacatattgcgcatccagaatgcggcgctcaggtacgagtatcttctaatgcccacggagctcacaacatggccactgggtatggataccgtgggtgacttgctcatcgcgcaggagaatgctgcactgataggattaatgcagctagggccctcatctgatttcacgagcaggcatgtggtgaaagacatacctgtgaacttgctgctcgatggcgaggattgggagtttgagattcctgtgcaagctggcatgtccagcttcccttccagctggtctcgcgtccgtattcggcacctggagatgcactttgtgaaggaggccagcggtattggtggtgagattatccaccagcctaccacccagactgggaccgtttacatccttctgcagggttccactatcttccatgaccgcagaagagaccaggtgttgccttttcaggccgctgctccgctcaactaccattacgcgtaccgcctcgacaccggcgactccactctcacaaacgaaccctctgaacagtttgccaacaagttcatgcagatgacacccttcacccgttggaggcttcgtctgtctgcgtccgcaaaagagaatgcaggattagcctttcccacggctacagcacttgactccactacccagattgtcatcactttccatgttacggccatcagacaaattgactggcggcacgacgaagag

SEQ ID NO: 369 - DNA, 2601 bp, synthetic construct
  misc_feature 1..2601: note = PtIP-83 polypeptide variant encoding polynucleotide
  source 1..2601: mol_type = other DNA
atggctctcgtggattacggcaagcttttcgaggatctgaaccagataagcatgggtgtactggatcgggtagagttttcagaggtgatggtgatccacaggatgtatgtgaggctagctgatctgaatgtggggcagctcgagggagccgagaaagtgaagcacttgtatatttttaccgacgttctcgagctaccagtcgtggaatggcggtggccgccgcaaataccaggatcggtgacggtgatcatattgtgtcgtcttcttcaatggccaactgatgggaggcagtcggacaccgagctccacctgacattcatgaagttgcatgccatacaacgagaggaaaatcggtgggagataaccgcagcagatggcatgaactggggagtttacatacacgcagaggaagtacaggttggcgtgctgacaatgtcatggtcttcggtacttagagtttcggcacttcgctctgttataacctccggctttcgcgccgttagtgtgtttgaggtaccgggaagtgtaaggtccacccttggagctactttaaggcccgatcacgccttatatagtacaactatgcaagccacacccaacgcatcgcatattagtgcttttaaccttcgcatagtttccccgtcggcatatcgtgtttgtcctctccaaaatgacacagatacctacttaggtattccagcagacgtggcggcagttcttccagtagacgtggtgactgatcctaacatcttgctgggcatgcagacaacggtacacattgcggagctagtcaaggcatgtcatccgtcacccgatgttgtgagcgctgtaggggagcacctgaactggctcaacaaactcttactcccacttaaggaatcgactcagttgcaaggaagcgagtcgtacaaggagtgccttgcactcttgggtcgtgttcacgctgcgatgaagatggtgagaattggcttagtagtgccccagctgcaatacagaatgtacggtagcctcatcaaccaaatggcccaagtagcacaaaactacgaccgagaattcaagcaattcaaattattcatcatccaaaatcaaatccttggcagctatttgctgcagcagaacagggcatttgctgagagggagctgcagatggagagctttcatgctgctgtcatttctcaaagaagggaggagttggacaatacattcgcaaagatggaccgattgagcgggcaaatggaggcagagagtagtgcaatggagcaagccaaaaaggaaatggacgaaggattgaggcagttccagaataggcaagttgcgaacgccctctttgccgttcttagcgctgtagctcagattgggcttgcattccttacggctggtgcaacggctcctggagctgtggcgtcggcggggcaagctgtgagcatagcaggtcaggcggcgcaaggtctgcgaagggtggtggaaattctagagcagctggaggctgtgatggaggttgtggctgctgtgaaggacctcgtggattcattggaacaggtaggtcagattgtggacgcaccggtgatgccggaattgccctcagaggcggactggtccatttttgtgaacgaggtggaggccgtggcagagggcatgccaacggaagtctcggaggttccggtgtggctggccaggtgcaagaatgtggctgcactgggtcgggagatgagcatcacggcagtacagatgtcggagctgcagtatgacatctgggtgcaaggcatgatgcgggatatggctcgaagccaggcagacaggctggccgcaattcaacccgcggaccttaccaactatttggagatggctacccagatggatatgcggactacgaggatgctgctggggctcctcaacatattgcgcatccagaatgcggcgctcaggtacgagtatcttctaatgcccacggagctcacaacatggccactgggtatggataccgtgggtgacttgctcatcgcgcaggagaatgctgcactgataggattaatgcagctagggccctcatctgatttcacgagcaggcatgtggtgaaagacatacctgtgaacttgctgctcgatggcgaggattgggagtttgagattcctgtgcaagctggcatgtccagcttcccttccagctggtctcgcgtccgtattcggcacctggagatgcactttgtgaaggaggccagcggtattggtggtgagattatccaccagcctaccacccagactgggaccgtttacatccttctgcagggttccactatcttccatgaccgcagaagagaccaggtgttgccttttcaggccgctgctccgctcaactaccattacgcgtaccgcctcgacaccggcgactccactctcacaaacgaaccctctgaacagtttgccaacaagttcatgcagatgacacccttcacccgttggaggcttcgtctgtctgcgtccgcaaaagagaatgcaggattagcctttcccacggctacagcacttgactccactacccagattgtcatcactttccatgttacggccatcagacaaattgactggcggcacgacgaagag

SEQ ID NO: 370 - DNA, 2601 bp, synthetic construct
  misc_feature 1..2601: note = PtIP-83 polypeptide variant encoding polynucleotide
  source 1..2601: mol_type = other DNA
atggctctcgtggattacggcaagcttttcgaggatctgaaccagataagcatgggtgtactggatcgggtagagttttcagaggtgatggtgatccacaggatgtatgtgaggctagctgatctgaatgtggggcagctcgagggagccgagaaagtgaagcacttgtatatttttaccgacgttctcgagctaccagtcgtggaatggcggtggccgccgcaaataccaggatcggtgacggtgatcatattgtgtcgtcttcttcaatggccaactgatgggaggcagtcggacaccgagctccacctgacattcatgaagttgcatgccatacaacgagaggaaaatcggtgggagataaccgcagcagatggcatgaactggggagtttacatacacgcagaggaagtacaggttggcgtgctgacaatgtcatggtcttcggtacttagagtttcggcacttcgctctgttataacctccggctttcgcgccgttagtgtgtttgaggtaccgggaagtgtaaggtccacccttggagctactttaaggcccgatcacgccttatatagtacaactatgcaagccacacccaacgcatcgcatattagtgcttttaaccttcgcatagtttccccgtcggcatatcgtgtttgtcctctccaaaatgacacagatacctacttaggtattccagcagacgtggcggcagttcttccagtagacgtggtgactgatcctaacatcttgctgggcatgcagacaacggtacacattgcggagctagtcaaggcatgtcatccgtcacccgatgttgtgagcgctgtaggggagcacctgaactggctcaacaaactcttactcccacttaaggaatcgactcagttgcaaggaagcgagtcgtacaaggagtgccttgcactcttgggtcgtgttcacgctgcgatgaagatggtgagaattggcttagtagtgccccagctgcaatacagaatgtacggtagcctcatcaaccaaatggcccaagtagcacaaaactacgaccgagaattcaagcaattcaaattattcatcatccaaaatcaaatccttggcagctatttgctgcagcagaacagggcatttgctgagagggagctgcagatggagagctttcatgctgctgtcatttctcaaagaagggaggagttggacaatacattcgcaaagatggaccgattgagcgggcaaatggaggcagagagtagtgcaatggagcaagccaaaaaggaaatggacgaaggattgaggcagttccagaataggcaagttgcgaacgccctctttgccgttcttagcgctgtagctcagattgggcttgcattccttacggctggtgcaacggctcctggagctgtggcgtcggcggggcaagctgtgagcatagcaggtcaggcggcgcaaggtctgcgaagggtggtggaaattctagagcagctggaggctgtgatggaggttgtggctgctgtgaaggacctcgtggattcattggaacaggtaggtcagattgtggacgcaccggtgatgccggaattgccctcagaggcggactggtccatttttgtgaacgaggtggaggccgtggcagagggcatgccaacggaagtctcggaggttccggtgtggcaggccaggtgcaagcatgtggctgcactgggtcgggagatgagcatcacggcagtacagatgtcggagctgcagtatgacatctgggtgcaaggcatgatgcgggatatggctcgaagccaggcagacaggctggccgcaattcaacccgcggaccttaccaactatttggagatggctacccagatggatatgcggactacgaggatgctgctggggctcctcaacatattgcgcatccagaatgcggcgctcaggtacgagtatcttctaatgcccacggagctcacaacatggccactgggtatggataccgtgggtgacttgctcatcgcgcaggagaatgctgcactgataggattaatgcagctagggccctcatctgatttcacgagcaggcatgtggtgaaagacatacctgtgaacttgctgctcgatggcgaggattgggagtttgagattcctgtgcaagctggcatgtccagcttcccttccagctggtctcgcgtccgtattcggcacctggagatgcactttgtgaaggaggccagcggtattggtggtgagattatccaccagcctaccacccagactgggaccgtttacatccttctgcagggttccactatcttccatgaccgcagaagagaccaggtgttgccttttcaggccgctgctccgctcaactaccattacgcgtaccgcctcgacaccggcgactccactctcacaaacgaaccctctgaacagtttgccaacaagttcatgcagatgacacccttcacccgttggaggcttcgtctgtctgcgtccgcaaaagagaatgcaggattagcctttcccacggctacagcacttgactccactacccagattgtcatcactttccatgttacggccatcagacaaattgactggcggcacgacgaagag

SEQ ID NO: 371 - DNA, 2601 bp, synthetic construct
  misc_feature 1..2601: note = PtIP-83 polypeptide variant encoding polynucleotide
  source 1..2601: mol_type = other DNA
atggctctcgtggattacggcaagcttttcgaggatctgaaccagataagcatgggtgtactggatcgggtagagttttcagaggtgatggtgatccacaggatgtatgtgaggctagctgatctgaatgtggggcagctcgagggagccgagaaagtgaagcacttgtatgtttttgccgacgttatcgagctaccagtcgtggaatggcggtggccgccgcaaataccaggatcggtgacggtgatcatattgtgtcgtcttcttcaatggccaactgatgggaggcagtcggacaccgagctccacctgacattcatgaagttgcatgccatacaacgagaggaaaatcggtgggagataaccgcagcagatggcatgaactggggagtttacatacacgcagaggaagtacaggttggcgtgctgacaatgtcatggtcttcggtacttagagtttcggcacttcgctctgttataacctccggctttcgcgccgttagtgtgtttgaggtaccgggaagtgtaaggtccacccttggagctactttaaggcccgatcacgccttatatagtacaactatgcaagccacacccaacgcatcgcatattagtgcttttaaccttcgcatagtttccccgtcggcatatcgtgtttgtcctctccaaaatgacacagatacctacttaggtattccagcagacgtggcggcagttcttccagtagacgtggtgactgatcctaacatcttgctgggcatgcagacaacggtacacattgcggagctagtcaaggcatgtcatccgtcacccgatgttgtgagcgctgtaggggagcacctgaactggctcaacaaactcttactcccacttaaggaatcgactcagttgcaaggaagcgagtcgtacaaggagtgccttgcactcttgggtcgtgttcacgctgcgatgaagatggtgagaattggcttagtagtgccccagctgcaatacagaatgtacggtagcctcatcaaccaaatggcccaagtagcacaaaactacgaccgagaattcaagcaattcaaattattcatcatccaaaatcaaatccttggcagctatttgctgcagcagaacagggcatttgctgagagggagctgcagatggagagctttcatgctgctgtcatttctcaaagaagggaggagttggacaatacattcgcaaagatggaccgattgagcgggcaaatggaggcagagagtagtgcaatggagcaagccaaaaaggaaatggacgaaggattgaggcagttccagaataggcaagttgcgaacgccctctttgccgttcttagcgctgtagctcagattgggcttgcattccttacggctggtgcaacggctcctggagctgtggcgtcggcggggcaagctgtgagcatagcaggtcaggcggcgcaaggtctgcgaagggtggtggaaattctagagcagctggaggctgtgatggaggttgtggctgctgtgaaggacctcgtggattcattggaacaggtaggtcagattgtggacgcaccggtgatgccggaattgccctcagaggcggactggtccatttttgtgaacgaggtggaggccgtggcagagggcatgccaacggaagtctcggaggttccggtgtggcaggccaggtgcaagcatgtggctgcactgggtcgggagatgagcatcacggcagtacagatgtcggagctgcagtatgacatctgggtgcaaggcatgatgcgggatatggctcgaagccaggcagacaggctggccgcaattcaacccgcggaccttaccaactatttggagatggctacccagatggatatgcggactacgaggatgctgctggggctcctcaacatattgcgcatccagaatgcggcgctcaggtacgagtatcttctaatgcccacggagctcacaacatggccactgggtatggataccgtgggtgacttgctcatcgcgcaggagaatgctgcactgataggattaatgcagctagggccctcatctgatttcacgagcaggcatgtggtgaaagacatacctgtgaacttgctgctcgatggcgaggattgggagtttgagattcctgtgcaagctggcatgtccagcttcccttccagctggtctcgcgtccgtattcggcacctggagatgcactttgtgaaggaggccagcggtattggtggtgagattatccaccagcctaccacccagactgggaccgtttacatccttctgcagggttccactatcttccatgaccgcagaagagaccaggtgttgccttttcaggccgctgctccgctcaactaccattacgcgtaccgcctcgacaccggcgactccactctcacaaacgaaccctctgaacagtttgccaacaagttcatgcagatgacacccttcacccgttggaggcttcgtctgtctgcgtccgcaaaagagaatgcaggattagcctttcccacggctacagcacttgactccactacccagattgtcatcactttccatgttacggccatcagacaaattgactggcggcacgacgaagag

SEQ ID NO: 372 - DNA, 2601 bp, synthetic construct
  misc_feature 1..2601: note = PtIP-83 polypeptide variant encoding polynucleotide
  source 1..2601: mol_type = other DNA
atggctctcgtggattacggcaagcttttcgaggatctgaaccagataagcatgggtgtactggatcgggtagagttttcagaggtgatggtgatccacaggatgtatgtgaggctagctgatctgaatgtggggcagctcgagggagccgagaaagtgaagcacttgtatgtttttgccgacgttatcgagctaccagtcgtggaatggcggtggccgccgcaaataccaggatcggtgacggtgatcatattgtgtcgtcttcttcaatggccaactgatgggaggcagtcggacaccgagctccacctgacattcatgaagttgcatgccatacaacgagaggaaaatcggtgggagataaccgcagcagatggcatgaactggggagtttacatacacgcagaggaagtacaggttggcgtgctgacaatgtcatggtcttcggtacttagagtttcggcacttcgctctgttataacctccggctttcgcgccgttagtgtgtttgaggtaccgggaagtgtaaggtccacccttggagctactttaaggcccgatcacgccttatatagtacaactatgcaagccacacccaacgcatcgcatattagtgcttttaaccttcgcatagtttccccgtcggcatatcgtgtttgtcctctccaaaatgacacagatacctacttaggtattccagcagacgtggcggcagttcttccagtagacgtggtgactgatcctaacatcttgctgggcatgcagacaacggtacacattgcggagctagtcaaggcatgtcatccgtcacccgatgttgtgagcgctgtaggggagcacctgaactggctcaacaaactcttactcccacttaaggaatcgactcagttgcaaggaagcgagtcgtacaaggagtgccttgcactcttgggtcgtgttcacgctgcgatgaagatggtgagaattggcttagtagtgccccagctgcaatacagaatgtacggtagcctcatcaaccaaatggcccaagtagcacaaaactacgaccgagaattcaagcaattcaaattattcatcatccaaaatcaaatccttggcagctatttgctgcagcagaacagggcatttgctgagagggagctgcagatggagagctttcatgctgctgtcatttctcaaagaagggaggagttggacaatacattcgcaaagatggaccgattgagcgggcaaatggaggcagagagtagtgcaatggagcaagccaaaaaggaaatggacgaaggattgaggcagttccagaataggcaagttgcgaacgccctctttgccgttcttagcgctgtagctcagattgggcttgcattccttacggctggtgcaacggctcctggagctgtggcgtcggcggggcaagctgtgagcatagcaggtcaggcggcgcaaggtctgcgaagggtggtggaaattctagagcagctggaggctgtgatggaggttgtggctgctgtgaaggacctcgtggattcattggaacaggtaggtcagattgtggacgcaccggtgatgccggaattgccctcagaggcggactggtccatttttgtgaacgaggtggaggccgtggcagagggcatgccaacggaagtctcggaggttccggtgtggagggccaggtgcaagaatgtggctgcactgggtcgggagatgagcatcacggcagtacagatgtcggagctgcagtatgacatctgggtgcaaggcatgatgcgggatatggctcgaagccaggcagacaggctggccgcaattcaacccgcggaccttaccaactatttggagatggctacccagatggatatgcggactacgaggatgctgctggggctcctcaacatattgcgcatccagaatgcggcgctcaggtacgagtatcttctaatgcccacggagctcacaacatggccactgggtatggataccgtgggtgacttgctcatcgcgcaggagaatgctgcactgataggattaatgcagctagggccctcatctgatttcacgagcaggcatgtggtgaaagacatacctgtgaacttgctgctcgatggcgaggattgggagtttgagattcctgtgcaagctggcatgtccagcttcccttccagctggtctcgcgtccgtattcggcacctggagatgcactttgtgaaggaggccagcggtattggtggtgagattatccaccagcctaccacccagactgggaccgtttacatccttctgcagggttccactatcttccatgaccgcagaagagaccaggtgttgccttttcaggccgctgctccgctcaactaccattacgcgtaccgcctcgacaccggcgactccactctcacaaacgaaccctctgaacagtttgccaacaagttcatgcagatgacacccttcacccgttggaggcttcgtctgtctgcgtccgcaaaagagaatgcaggattagcctttcccacggctacagcacttgactccactacccagattgtcatcactttccatgttacggccatcagacaaattgactggcggcacgacgaagag

SEQ ID NO: 373 - DNA, 2601 bp, synthetic construct
  misc_feature 1..2601: note = PtIP-83 polypeptide variant encoding polynucleotide
  source 1..2601: mol_type = other DNA
atggctctcgtggattacggcaagcttttcgaggatctgaaccagataagcatgggtgtactggatcgggtagagttttcagaggtgatggtgatccacaggatgtatgtgaggctagctgatctgaatgtggggcagctcgagggagccgagaaagtgaagcagttgtatattttttgcgacgttctcgagctaccagtcgtggaatggcggtggccgccgcaaataccaggatcggtgacggtgatcatattgtgtcgtcttcttcaatggccaactgatgggaggcagtcggacaccgagctccacctgacattcatgaagttgcatgccatacaacgagaggaaaatcggtgggagataaccgcagcagatggcatgaactggggagtttacatacacgcagaggaagtacaggttggcgtgctgacaatgtcatggtcttcggtacttagagtttcggcacttcgctctgttataacctccggctttcgcgccgttagtgtgtttgaggtaccgggaagtgtaaggtccacccttggagctactttaaggcccgatcacgccttatatagtacaactatgcaagccacacccaacgcatcgcatattagtgcttttaaccttcgcatagtttccccgtcggcatatcgtgtttgtcctctccaaaatgacacagatacctacttaggtattccagcagacgtggcggcagttcttccagtagacgtggtgactgatcctaacatcttgctgggcatgcagacaacggtacacattgcggagctagtcaaggcatgtcatccgtcacccgatgttgtgagcgctgtaggggagcacctgaactggctcaacaaactcttactcccacttaaggaatcgactcagttgcaaggaagcgagtcgtacaaggagtgccttgcactcttgggtcgtgttcacgctgcgatgaagatggtgagaattggcttagtagtgccccagctgcaatacagaatgtacggtagcctcatcaaccaaatggcccaagtagcacaaaactacgaccgagaattcaagcaattcaaattattcatcatccaaaatcaaatccttggcagctatttgctgcagcagaacagggcatttgctgagagggagctgcagatggagagctttcatgctgctgtcatttctcaaagaagggaggagttggacaatacattcgcaaagatggaccgattgagcgggcaaatggaggcagagagtagtgcaatggagcaagccaaaaaggaaatggacgaaggattgaggcagttccagaataggcaagttgcgaacgccctctttgccgttcttagcgctgtagctcagattgggcttgcattccttacggctggtgcaacggctcctggagctgtggcgtcggcggggcaagctgtgagcatagcaggtcaggcggcgcaaggtctgcgaagggtggtggaaattctagagcagctggaggctgtgatggaggttgtggctgctgtgaaggacctcgtggattcattggaacaggtaggtcagattgtggacgcaccggtgatgccggaattgccctcagaggcggactggtccatttttgtgaacgaggtggaggccgtggcagagggcatgccaacggaagtctcggaggttccggtgtggcaggccaggtgcaagaatgtggctgcactgggtcgggagatgagcatcacggcagtacagatgtcggagctgcagtatgacatctgggtgcaaggcatgatgcgggatatggctcgaagccaggcagacaggctggccgcaattcaacccgcggaccttaccaactatttggagatggctacccagatggatatgcggactacgaggatgctgctggggctcctcaacatattgcgcatccagaatgcggcgctcaggtacgagtatcttctaatgcccacggagctcacaacatggccactgggtatggataccgtgggtgacttgctcatcgcgcaggagaatgctgcactgataggattaatgcagctagggccctcatctgatttcacgagcaggcatgtggtgaaagacatacctgtgaacttgctgctcgatggcgaggattgggagtttgagattcctgtgcaagctggcatgtccagcttcccttccagctggtctcgcgtccgtattcggcacctggagatgcactttgtgaaggaggccagcggtattggtggtgagattatccaccagcctaccacccagactgggaccgtttacatccttctgcagggttccactatcttccatgaccgcagaagagaccaggtgttgccttttcaggccgctgctccgctcaactaccattacgcgtaccgcctcgacaccggcgactccactctcacaaacgaaccctctgaacagtttgccaacaagttcatgcagatgacacccttcacccgttggaggcttcgtctgtctgcgtccgcaaaagagaatgcaggattagcctttcccacggctacagcacttgactccactacccagattgtcatcactttccatgttacggccatcagacaaattgactggcggcacgacgaagag

SEQ ID NO: 374 - DNA, 2601 bp, synthetic construct
  misc_feature 1..2601: note = PtIP-83 polypeptide variant encoding polynucleotide
  source 1..2601: mol_type = other DNA
atggctctcgtggattacggcaagcttttcgaggatctgaaccagataagcatgggtgtactggatcgggtagagttttcagaggtgatggtgatccacaggatgtatgtgaggctagctgatctgaatgtggggcagctcgagggagccgagaaagtgaagcgcttctatatctttgccgacatcgtcgagctcccagtcgtggaatggcggtggccgccgcaaataccaggatcggtgacggtgatcatattgtgtcgtcttcttcaatggccaactgatgggaggcagtcggacaccgagctccacctgacattcatgaagttgcatgccatacaacgagaggaaaatcggtgggagataaccgcagcagatggcatgaactggggagtttacatacacgcagaggaagtacaggttggcgtgctgacaatgtcatggtcttcggtacttagagtttcggcacttcgctctgttataacctccggctttcgcgccgttagtgtgtttgaggtaccgggaagtgtaaggtccacccttggagctactttaaggcccgatcacgccttatatagtacaactatgcaagccacacccaacgcatcgcatattagtgcttttaaccttcgcatagtttccccgtcggcatatcgtgtttgtcctctccaaaatgacacagatacctacttaggtattccagcagacgtggcggcagttcttccagtagacgtggtgactgatcctaacatcttgctgggcatgcagacaacggtacacattgcggagctagtcaaggcatgtcatccgtcacccgatgttgtgagcgctgtaggggagcacctgaactggctcaacaaactcttactcccacttaaggaatcgactcagttgcaaggaagcgagtcgtacaaggagtgccttgcactcttgggtcgtgttcacgctgcgatgaagatggtgagaattggcttagtagtgccccagctgcaatacagaatgtacggtagcctcatcaaccaaatggcccaagtagcacaaaactacgaccgagaattcaagcaattcaaattattcatcatccaaaatcaaatccttggcagctatttgctgcagcagaacagggcatttgctgagagggagctgcagatggagagctttcatgctgctgtcatttctcaaagaagggaggagttggacaatacattcgcaaagatggaccgattgagcgggcaaatggaggcagagagtagtgcaatggagcaagccaaaaaggaaatggacgaaggattgaggcagttccagaataggcaagttgcgaacgccctctttgccgttcttagcgctgtagctcagattgggcttgcattccttacggctggtgcaacggctcctggagctgtggcgtcggcggggcaagctgtgagcatagcaggtcaggcggcgcaaggtctgcgaagggtggtggaaattctagagcagctggaggctgtgatggaggttgtggctgctgtgaaggacctcgtggattcattggaacaggtaggtcagattgtggacgcaccggtgatgccggaattgccctcagaggcggactggtccatttttgtgaacgaggtggaggccgtggcagagggcatgccaacggaagtctcggaggttccggtgtggatcggcaagtgcaagaatgtggctgcactgggtcgggagatgagcatcacggcagtacagatgtcggagctgcagtatgacatctgggtgcaaggcatgatgcgggatatggctcgaagccaggcagacaggctggccgcaattcaacccgcggaccttaccaactatttggagatggctacccagatggatatgcggactacgaggatgctgctggggctcctcaacatattgcgcatccagaatgcggcgctcaggtacgagtatcttctaatgcccacggagctcacaacatggccactgggtatggataccgtgggtgacttgctcatcgcgcaggagaatgctgcactgataggattaatgcagctagggccctcatctgatttcacgagcaggcatgtggtgaaagacatacctgtgaacttgctgctcgatggcgaggattgggagtttgagattcctgtgcaagctggcatgtccagcttcccttccagctggtctcgcgtccgtattcggcacctggagatgcactttgtgaaggaggccagcggtattggtggtgagattatccaccagcctaccacccagactgggaccgtttacatccttctgcagggttccactatcttccatgaccgcagaagagaccaggtgttgccttttcaggccgctgctccgctcaactaccattacgcgtaccgcctcgacaccggcgactccactctcacaaacgaaccctctgaacagtttgccaacaagttcatgcagatgacacccttcacccgttggaggcttcgtctgtctgcgtccgcaaaagagaatgcaggattagcctttcccacggctacagcacttgactccactacccagattgtcatcactttccatgttacggccatcagacaaattgactggcggcacgacgaagag

SEQ ID NO: 375 - DNA, 2601 bp, synthetic construct
  misc_feature 1..2601: note = PtIP-83 polypeptide variant encoding polynucleotide
  source 1..2601: mol_type = other DNA
atggctctcgtggattacggcaagcttttcgaggatctgaaccagataagcatgggtgtactggatcgggtagagttttcagaggtgatggtgatccacaggatgtatgtgaggctagctgatctgaatgtggggcagctcgagggagccgagaaagtgaagcgcttctatatctttgccgacatcgtcgagctcccagtcgtggaatggcggtggccgccgcaaataccaggatcggtgacggtgatcatattgtgtcgtcttcttcaatggccaactgatgggaggcagtcggacaccgagctccacctgacattcatgaagttgcatgccatacaacgagaggaaaatcggtgggagataaccgcagcagatggcatgaactggggagtttacatacacgcagaggaagtacaggttggcgtgctgacaatgtcatggtcttcggtacttagagtttcggcacttcgctctgttataacctccggctttcgcgccgttagtgtgtttgaggtaccgggaagtgtaaggtccacccttggagctactttaaggcccgatcacgccttatatagtacaactatgcaagccacacccaacgcatcgcatattagtgcttttaaccttcgcatagtttccccgtcggcatatcgtgtttgtcctctccaaaatgacacagatacctacttaggtattccagcagacgtggcggcagttcttccagtagacgtggtgactgatcctaacatcttgctgggcatgcagacaacggtacacattgcggagctagtcaaggcatgtcatccgtcacccgatgttgtgagcgctgtaggggagcacctgaactggctcaacaaactcttactcccacttaaggaatcgactcagttgcaaggaagcgagtcgtacaaggagtgccttgcactcttgggtcgtgttcacgctgcgatgaagatggtgagaattggcttagtagtgccccagctgcaatacagaatgtacggtagcctcatcaaccaaatggcccaagtagcacaaaactacgaccgagaattcaagcaattcaaattattcatcatccaaaatcaaatccttggcagctatttgctgcagcagaacagggcatttgctgagagggagctgcagatggagagctttcatgctgctgtcatttctcaaagaagggaggagttggacaatacattcgcaaagatggaccgattgagcgggcaaatggaggcagagagtagtgcaatggagcaagccaaaaaggaaatggacgaaggattgaggcagttccagaataggcaagttgcgaacgccctctttgccgttcttagcgctgtagctcagattgggcttgcattccttacggctggtgcaacggctcctggagctgtggcgtcggcggggcaagctgtgagcatagcaggtcaggcggcgcaaggtctgcgaagggtggtggaaattctagagcagctggaggctgtgatggaggttgtggctgctgtgaaggacctcgtggattcattggaacaggtaggtcagattgtggacgcaccggtgatgccggaattgccctcagaggcggactggtccatttttgtgaacgaggtggaggccgtggcagagggcatgccaacggaagtctcggaggttccggtgtggacggtcaagtgcaagaatgtggctgcactgggtcgggagatgagcatcacggcagtacagatgtcggagctgcagtatgacatctgggtgcaaggcatgatgcgggatatggctcgaagccaggcagacaggctggccgcaattcaacccgcggaccttaccaactatttggagatggctacccagatggatatgcggactacgaggatgctgctggggctcctcaacatattgcgcatccagaatgcggcgctcaggtacgagtatcttctaatgcccacggagctcacaacatggccactgggtatggataccgtgggtgacttgctcatcgcgcaggagaatgctgcactgataggattaatgcagctagggccctcatctgatttcacgagcaggcatgtggtgaaagacatacctgtgaacttgctgctcgatggcgaggattgggagtttgagattcctgtgcaagctggcatgtccagcttcccttccagctggtctcgcgtccgtattcggcacctggagatgcactttgtgaaggaggccagcggtattggtggtgagattatccaccagcctaccacccagactgggaccgtttacatccttctgcagggttccactatcttccatgaccgcagaagagaccaggtgttgccttttcaggccgctgctccgctcaactaccattacgcgtaccgcctcgacaccggcgactccactctcacaaacgaaccctctgaacagtttgccaacaagttcatgcagatgacacccttcacccgttggaggcttcgtctgtctgcgtccgcaaaagagaatgcaggattagcctttcccacggctacagcacttgactccactacccagattgtcatcactttccatgttacggccatcagacaaattgactggcggcacgacgaagag

SEQ ID NO: 376 - DNA, 2601 bp, synthetic construct
  misc_feature 1..2601: note = PtIP-83 polypeptide variant encoding polynucleotide
  source 1..2601: mol_type = other DNA
atggctctcgtggattacggcaagcttttcgaggatctgaaccagataagcatgggtgtactggatcgggtagagttttcagaggtgatggtgatccacaggatgtatgtgaggctagctgatctgaatgtggggcagctcgagggagccgagaaagtgaagcgcttgtatatttttgccgacattatcgagctaccagtcgtggaatggcggtggccgccgcaaataccaggatcggtgacggtgatcatattgtgtcgtcttcttcaatggccaactgatgggaggcagtcggacaccgagctccacctgacattcatgaagttgcatgccatacaacgagaggaaaatcggtgggagataaccgcagcagatggcatgaactggggagtttacatacacgcagaggaagtacaggttggcgtgctgacaatgtcatggtcttcggtacttagagtttcggcacttcgctctgttataacctccggctttcgcgccgttagtgtgtttgaggtaccgggaagtgtaaggtccacccttggagctactttaaggcccgatcacgccttatatagtacaactatgcaagccacacccaacgcatcgcatattagtgcttttaaccttcgcatagtttccccgtcggcatatcgtgtttgtcctctccaaaatgacacagatacctacttaggtattccagcagacgtggcggcagttcttccagtagacgtggtgactgatcctaacatcttgctgggcatgcagacaacggtacacattgcggagctagtcaaggcatgtcatccgtcacccgatgttgtgagcgctgtaggggagcacctgaactggctcaacaaactcttactcccacttaaggaatcgactcagttgcaaggaagcgagtcgtacaaggagtgccttgcactcttgggtcgtgttcacgctgcgatgaagatggtgagaattggcttagtagtgccccagctgcaatacagaatgtacggtagcctcatcaaccaaatggcccaagtagcacaaaactacgaccgagaattcaagcaattcaaattattcatcatccaaaatcaaatccttggcagctatttgctgcagcagaacagggcatttgctgagagggagctgcagatggagagctttcatgctgctgtcatttctcaaagaagggaggagttggacaatacattcgcaaagatggaccgattgagcgggcaaatggaggcagagagtagtgcaatggagcaagccaaaaaggaaatggacgaaggattgaggcagttccagaataggcaagttgcgaacgccctctttgccgttcttagcgctgtagctcagattgggcttgcattccttacggctggtgcaacggctcctggagctgtggcgtcggcggggcaagctgtgagcatagcaggtcaggcggcgcaaggtctgcgaagggtggtggaaattctagagcagctggaggctgtgatggaggttgtggctgctgtgaaggacctcgtggattcattggaacaggtaggtcagattgtggacgcaccggtgatgccggaattgccctcagaggcggactggtccatttttgtgaacgaggtggaggccgtggcagagggcatgccaacggaagtctcggaggttccggtgtggatggtcaagtgcaagaatgtggctgcactgggtcgggagatgagcatcacggcagtacagatgtcggagctgcagtatgacatctgggtgcaaggcatgatgcgggatatggctcgaagccaggcagacaggctggccgcaattcaacccgcggaccttaccaactatttggagatggctacccagatggatatgcggactacgaggatgctgctggggctcctcaacatattgcgcatccagaatgcggcgctcaggtacgagtatcttctaatgcccacggagctcacaacatggccactgggtatggataccgtgggtgacttgctcatcgcgcaggagaatgctgcactgataggattaatgcagctagggccctcatctgatttcacgagcaggcatgtggtgaaagacatacctgtgaacttgctgctcgatggcgaggattgggagtttgagattcctgtgcaagctggcatgtccagcttcccttccagctggtctcgcgtccgtattcggcacctggagatgcactttgtgaaggaggccagcggtattggtggtgagattatccaccagcctaccacccagactgggaccgtttacatccttctgcagggttccactatcttccatgaccgcagaagagaccaggtgttgccttttcaggccgctgctccgctcaactaccattacgcgtaccgcctcgacaccggcgactccactctcacaaacgaaccctctgaacagtttgccaacaagttcatgcagatgacacccttcacccgttggaggcttcgtctgtctgcgtccgcaaaagagaatgcaggattagcctttcccacggctacagcacttgactccactacccagattgtcatcactttccatgttacggccatcagacaaattgactggcggcacgacgaagag

SEQ ID NO: 377 - DNA, 2601 bp, synthetic construct
  misc_feature 1..2601: note = PtIP-83 polypeptide variant encoding polynucleotide
  source 1..2601: mol_type = other DNA
atggctctcgtggattacggcaagcttttcgaggatctgaaccagataagcatgggtgtactggatcgggtagagttttcagaggtgatggtgatccacaggatgtatgtgaggctagctgatctgaatgtggggcagctcgagggagccgagaaagtgaagcgcttgtatatttttgccgacattatcgagctaccagtcgtggaatggcggtggccgccgcaaataccaggatcggtgacggtgatcatattgtgtcgtcttcttcaatggccaactgatgggaggcagtcggacaccgagctccacctgacattcatgaagttgcatgccatacaacgagaggaaaatcggtgggagataaccgcagcagatggcatgaactggggagtttacatacacgcagaggaagtacaggttggcgtgctgacaatgtcatggtcttcggtacttagagtttcggcacttcgctctgttataacctccggctttcgcgccgttagtgtgtttgaggtaccgggaagtgtaaggtccacccttggagctactttaaggcccgatcacgccttatatagtacaactatgcaagccacacccaacgcatcgcatattagtgcttttaaccttcgcatagtttccccgtcggcatatcgtgtttgtcctctccaaaatgacacagatacctacttaggtattccagcagacgtggcggcagttcttccagtagacgtggtgactgatcctaacatcttgctgggcatgcagacaacggtacacattgcggagctagtcaaggcatgtcatccgtcacccgatgttgtgagcgctgtaggggagcacctgaactggctcaacaaactcttactcccacttaaggaatcgactcagttgcaaggaagcgagtcgtacaaggagtgccttgcactcttgggtcgtgttcacgctgcgatgaagatggtgagaattggcttagtagtgccccagctgcaatacagaatgtacggtagcctcatcaaccaaatggcccaagtagcacaaaactacgaccgagaattcaagcaattcaaattattcatcatccaaaatcaaatccttggcagctatttgctgcagcagaacagggcatttgctgagagggagctgcagatggagagctttcatgctgctgtcatttctcaaagaagggaggagttggacaatacattcgcaaagatggaccgattgagcgggcaaatggaggcagagagtagtgcaatggagcaagccaaaaaggaaatggacgaaggattgaggcagttccagaataggcaagttgcgaacgccctctttgccgttcttagcgctgtagctcagattgggcttgcattccttacggctggtgcaacggctcctggagctgtggcgtcggcggggcaagctgtgagcatagcaggtcaggcggcgcaaggtctgcgaagggtggtggaaattctagagcagctggaggctgtgatggaggttgtggctgctgtgaaggacctcgtggattcattggaacaggtaggtcagattgtggacgcaccggtgatgccggaattgccctcagaggcggactggtccatttttgtgaacgaggtggaggccgtggcagagggcatgccaacggaagtctcggaggttccggtgtggcaggccaggtgcaagaatgtggctgcactgggtcgggagatgagcatcacggcagtacagatgtcggagctgcagtatgacatctgggtgcaaggcatgatgcgggatatggctcgaagccaggcagacaggctggccgcaattcaacccgcggaccttaccaactatttggagatggctacccagatggatatgcggactacgaggatgctgctggggctcctcaacatattgcgcatccagaatgcggcgctcaggtacgagtatcttctaatgcccacggagctcacaacatggccactgggtatggataccgtgggtgacttgctcatcgcgcaggagaatgctgcactgataggattaatgcagctagggccctcatctgatttcacgagcaggcatgtggtgaaagacatacctgtgaacttgctgctcgatggcgaggattgggagtttgagattcctgtgcaagctggcatgtccagcttcccttccagctggtctcgcgtccgtattcggcacctggagatgcactttgtgaaggaggccagcggtattggtggtgagattatccaccagcctaccacccagactgggaccgtttacatccttctgcagggttccactatcttccatgaccgcagaagagaccaggtgttgccttttcaggccgctgctccgctcaactaccattacgcgtaccgcctcgacaccggcgactccactctcacaaacgaaccctctgaacagtttgccaacaagttcatgcagatgacacccttcacccgttggaggcttcgtctgtctgcgtccgcaaaagagaatgcaggattagcctttcccacggctacagcacttgactccactacccagattgtcatcactttccatgttacggccatcagacaaattgactggcggcacgacgaagag

SEQ ID NO: 378 - DNA, 2601 bp, synthetic construct
  misc_feature 1..2601: note = PtIP-83 polypeptide variant encoding polynucleotide
  source 1..2601: mol_type = other DNA
atggctctcgtggattacggcaagcttttcgaggatctgaaccagataagcatgggtgtactggatcgggtagagttttcagaggtgatggtgatccacaggatgtatgtgaggctagctgatctgaatgtggggcagctcgagggagccgaggaagtgaagcgcttgtatatttttgccgacattatcgagctaccagtcgtggaatggcggtggccgccgcaaataccaggatcggtgacggtgatcatattgtgtcgtcttcttcaatggccaactgatgggaggcagtcggacaccgagctccacctgacattcatgaagttgcatgccatacaacgagaggaaaatcggtgggagataaccgcagcagatggcatgaactggggagtttacatacacgcagaggaagtacaggttggcgtgctgacaatgtcatggtcttcggtacttagagtttcggcacttcgctctgttataacctccggctttcgcgccgttagtgtgtttgaggtaccgggaagtgtaaggtccacccttggagctactttaaggcccgatcacgccttatatagtacaactatgcaagccacacccaacgcatcgcatattagtgcttttaaccttcgcatagtttccccgtcggcatatcgtgtttgtcctctccaaaatgacacagatacctacttaggtattccagcagacgtggcggcagttcttccagtagacgtggtgactgatcctaacatcttgctgggcatgcagacaacggtacacattgcggagctagtcaaggcatgtcatccgtcacccgatgttgtgagcgctgtaggggagcacctgaactggctcaacaaactcttactcccacttaaggaatcgactcagttgcaaggaagcgagtcgtacaaggagtgccttgcactcttgggtcgtgttcacgctgcgatgaagatggtgagaattggcttagtagtgccccagctgcaatacagaatgtacggtagcctcatcaaccaaatggcccaagtagcacaaaactacgaccgagaattcaagcaattcaaattattcatcatccaaaatcaaatccttggcagctatttgctgcagcagaacagggcatttgctgagagggagctgcagatggagagctttcatgctgctgtcatttctcaaagaagggaggagttggacaatacattcgcaaagatggaccgattgagcgggcaaatggaggcagagagtagtgcaatggagcaagccaaaaaggaaatggacgaaggattgaggcagttccagaataggcaagttgcgaacgccctctttgccgttcttagcgctgtagctcagattgggcttgcattccttacggctggtgcaacggctcctggagctgtggcgtcggcggggcaagctgtgagcatagcaggtcaggcggcgcaaggtctgcgaagggtggtggaaattctagagcagctggaggctgtgatggaggttgtggctgctgtgaatgacctcgtggattcattggaacaggtaggtcagattgtggacgcaccggtgatgccggaattgccctcagaggcggactggtccatttttgtgaacgaggtggaggccgtggcagagggcatgccaacggaagtctcggaggttccggtgtggaggggcaagtgcaagagcgtggctgcactgggtcgggagatgagcatcacggcagtacagatgtcggagctgcagtatgacatctgggtgcaaggcatgatgcgggatatggctcgaagccaggcagacaggctggccgcaattcaacccgcggaccttaccaactatttggagatggctacccagatggatatgcggactacgaggatgctgctggggctcctcaacatattgcgcatccagaatgcggcgctcaggtacgagtatcttctaatgcccacggagctcacaacatggccactgggtatggataccgtgggtgacttgctcatcgcgcaggagaatgctgcactgataggattaatgcagctagggccctcatctgatttcacgagcaggcatgtggtgaaagacatacctgtgaacttgctgctcgatggcgaggattgggagtttgagattcctgtgcaagctggcatgtccagcttcccttccagctggtctcgcgtccgtattcggcacctggagatgcactttgtgaaggaggccagcggtattggtggtgagattatccaccagcctaccacccagactgggaccgtttacatccttctgcagggttccactatcttccatgaccgcagaagagaccaggtgttgccttttcaggccgctgctccgctcaactaccattacgcgtaccgcctcgacaccggcgactccactctcacaaacgaaccctctgaacagtttgccaacaagttcatgcagatgacacccttcacccgttggaggcttcgtctgtctgcgtccgcaaaagagaatgcaggattagcctttcccacggctacagcacttgactccactacccagattgtcatcactttccatgttacggccatcagacaaattgactggcggcacgacgaagag

SEQ ID NO: 379 - DNA, 2601 bp, synthetic construct
  misc_feature 1..2601: note = PtIP-83 polypeptide variant encoding polynucleotide
  source 1..2601: mol_type = other DNA
atggctctcgtggattacggcaagcttttcgaggatctgaaccagataagcatgggtgtactggatcgggtagagttttcagaggtgatggtgatccacaggatgtatgtgaggctagctgatctgaatgtggggcagctcgagggagccgagaaagtgaagcgcttgtatatttttgccgacattatcgagctaccagtcgtggaatggcggtggccgccgcaaataccaggatcggtgacggtgatcatattgtgtcgtcttcttcaatggccaactgatgggaggcagtcggacaccgagctccacctgacattcatgaagttgcatgccatacaacgagaggaaaatcggtgggagataaccgcagcagatggcatgaactggggagtttacatacacgcagaggaagtacaggttggcgtgctgacaatgtcatggtcttcggtacttagagtttcggcacttcgctctgttataacctccggctttcgcgccgttagtgtgtttgaggtaccgggaagtgtaaggtccacccttggagctactttaaggcccgatcacgccttatatagtacaactatgcaagccacacccaacgcatcgcatattagtgcttttaaccttcgcatagtttccccgtcggcatatcgtgtttgtcctctccaaaatgacacagatacctacttaggtattccagcagacgtggcggcagttcttccagtagacgtggtgactgatcctaacatcttgctgggcatgcagacaacggtacacattgcggagctagtcaaggcatgtcatccgtcacccgatgttgtgagcgctgtaggggagcacctgaactggctcaacaaactcttactcccacttaaggaatcgactcagttgcaaggaagcgagtcgtacaaggagtgccttgcactcttgggtcgtgttcacgctgcgatgaagatggtgagaattggcttagtagtgccccagctgcaatacagaatgtacggtagcctcatcaaccaaatggcccaagtagcacaaaactacgaccgagaattcaagcaattcaaattattcatcatccaaaatcaaatccttggcagctatttgctgcagcagaacagggcatttgctgagagggagctgcagatggagagctttcatgctgctgtcatttctcaaagaagggaggagttggacaatacattcgcaaagatggaccgattgagcgggcaaatggaggcagagagtagtgcaatggagcaagccaaaaaggaaatggacgaaggattgaggcagttccagaataggcaagttgcgaacgccctctttgccgttcttagcgctgtagctcagattgggcttgcattccttacggctggtgcaacggctcctggagctgtggcgtcggcggggcaagctgtgagcatagcaggtcaggcggcgcaaggtctgcgaagggtggtggaaattctagagcagctggaggctgtgatggaggttgtggctgctgtgaaggacctcgtggattcattggaacaggtaggtcagattgtggacgcaccggtgatgccggaattgccctcagaggcggactggtccatttttgtgaacgaggtggaggccgtggcagagggcatgccaacggaagtctcggaggttccggtgtggaggggccggtgcaagaccgtggctgcactgggtcgggagatgagcatcacggcagtacagatgtcggagctgcagtatgacatctgggtgcaaggcatgatgcgggatatggctcgaagccaggcagacaggctggccgcaattcaacccgcggaccttaccaactatttggagatggctacccagatggatatgcggactacgaggatgctgctggggctcctcaacatattgcgcatccagaatgcggcgctcaggtacgagtatcttctaatgcccacggagctcacaacatggccactgggtatggataccgtgggtgacttgctcatcgcgcaggagaatgctgcactgataggattaatgcagctagggccctcatctgatttcacgagcaggcatgtggtgaaagacatacctgtgaacttgctgctcgatggcgaggattgggagtttgagattcctgtgcaagctggcatgtccagcttcccttccagctggtctcgcgtccgtattcggcacctggagatgcactttgtgaaggaggccagcggtattggtggtgagattatccaccagcctaccacccagactgggaccgtttacatccttctgcagggttccactatcttccatgaccgcagaagagaccaggtgttgccttttcaggccgctgctccgctcaactaccattacgcgtaccgcctcgacaccggcgactccactctcacaaacgaaccctctgaacagtttgccaacaagttcatgcagatgacacccttcacccgttggaggcttcgtctgtctgcgtccgcaaaagagaatgcaggattagcctttcccacggctacagcacttgactccactacccagattgtcatcactttccatgttacggccatcagacaaattgactggcggcacgacgaagag

SEQ ID NO: 380 - DNA, 2601 bp, synthetic construct
  misc_feature 1..2601: note = PtIP-83 polypeptide variant encoding polynucleotide
  source 1..2601: mol_type = other DNA
atggctctcgtggattacggcaagcttttcgaggatctgaaccagataagcatgggtgtactggatcgggtagagttttcagaggtgatggtgatccacaggatgtatgtgaggctagctgatctgaatgtggggcagctcgagggagccgagaaagtgaagcgcttgtatatttttaccgacgttatcgagctaccagtcgtggaatggcggtggccgccgcaaataccaggatcggtgacggtgatcatattgtgtcgtcttcttcaatggccaactgatgggaggcagtcggacaccgagctccacctgacattcatgaagttgcatgccatacaacgagaggaaaatcggtgggagataaccgcagcagatggcatgaactggggagtttacatacacgcagaggaagtacaggttggcgtgctgacaatgtcatggtcttcggtacttagagtttcggcacttcgctctgttataacctccggctttcgcgccgttagtgtgtttgaggtaccgggaagtgtaaggtccacccttggagctactttaaggcccgatcacgccttatatagtacaactatgcaagccacacccaacgcatcgcatattagtgcttttaaccttcgcatagtttccccgtcggcatatcgtgtttgtcctctccaaaatgacacagatacctacttaggtattccagcagacgtggcggcagttcttccagtagacgtggtgactgatcctaacatcttgctgggcatgcagacaacggtacacattgcggagctagtcaaggcatgtcatccgtcacccgatgttgtgagcgctgtaggggagcacctgaactggctcaacaaactcttactcccacttaaggaatcgactcagttgcaaggaagcgagtcgtacaaggagtgccttgcactcttgggtcgtgttcacgctgcgatgaagatggtgagaattggcttagtagtgccccagctgcaatacagaatgtacggtagcctcatcaaccaaatggcccaagtagcacaaaactacgaccgagaattcaagcaattcaaattattcatcatccaaaatcaaatccttggcagctatttgctgcagcagaacagggcatttgctgagagggagctgcagatggagagctttcatgctgctgtcatttctcaaagaagggaggagttggacaatacattcgcaaagatggaccgattgagcgggcaaatggaggcagagagtagtgcaatggagcaagccaaaaaggaaatggacgaaggattgaggcagttccagaataggcaagttgcgaacgccctctttgccgttcttagcgctgtagctcagattgggcttgcattccttacggctggtgcaacggctcctggagctgtggcgtcggcggggcaagctgtgagcatagcaggtcaggcggcgcaaggtctgcgaagggtggtggaaattctagagcagctggaggctgtgatggaggttgtggctgctgtgaaggacctcgtggattcattggaacaggtaggtcagattgtggacgcaccggtgatgccggaattgccctcagaggcggactggtccatttttgtgaacgaggtggaggccgtggcagagggcatgccaacggaagtctcggaggttccggtgtggatcggcaagtgcaagaatgtggctgcactgggtcgggagatgagcatcacggcagtacagatgtcggagctgcagtatgacatctgggtgcaaggcatgatgcgggatatggctcgaagccaggcagacaggctggccgcaattcaacccgcggaccttaccaactatttggagatggctacccagatggatatgcggactacgaggatgctgctggggctcctcaacatattgcgcatccagaatgcggcgctcaggtacgagtatcttctaatgcccacggagctcacaacatggccactgggtatggataccgtgggtgacttgctcatcgcgcaggagaatgctgcactgataggattaatgcagctagggccctcatctgatttcacgagcaggcatgtggtgaaagacatacctgtgaacttgctgctcgatggcgaggattgggagtttgagattcctgtgcaagctggcatgtccagcttcccttccagctggtctcgcgtccgtattcggcacctggagatgcactttgtgaaggaggccagcggtattggtggtgagattatccaccagcctaccacccagactgggaccgtttacatccttctgcagggttccactatcttccatgaccgcagaagagaccaggtgttgccttttcaggccgctgctccgctcaactaccattacgcgtaccgcctcgacaccggcgactccactctcacaaacgaaccctctgaacagtttgccaacaagttcatgcagatgacacccttcacccgttggaggcttcgtctgtctgcgtccgcaaaagagaatgcaggattagcctttcccacggctacagcacttgactccactacccagattgtcatcactttccatgttacggccatcagacaaattgactggcggcacgacgaagag

SEQ ID NO: 381 - DNA, 2601 bp, synthetic construct
  misc_feature 1..2601: note = PtIP-83 polypeptide variant encoding polynucleotide
  source 1..2601: mol_type = other DNA
atggctctcgtggattacggcaagcttttcgaggatctgaaccagataagcatgggtgtactggatcgggtagagttttcagaggtgatggtgatccacaggatgtatgtgaggctagctgatctgaatgtggggcagctcgagggagccgagaaagtgaagcgcttgtatgttttttgcgacattatcgagctaccagtcgtggaatggcggtggccgccgcaaataccaggatcggtgacggtgatcatattgtgtcgtcttcttcaatggccaactgatgggaggcagtcggacaccgagctccacctgacattcatgaagttgcatgccatacaacgagaggaaaatcggtgggagataaccgcagcagatggcatgaactggggagtttacatacacgcagaggaagtacaggttggcgtgctgacaatgtcatggtcttcggtacttagagtttcggcacttcgctctgttataacctccggctttcgcgccgttagtgtgtttgaggtaccgggaagtgtaaggtccacccttggagctactttaaggcccgatcacgccttatatagtacaactatgcaagccacacccaacgcatcgcatattagtgcttttaaccttcgcatagtttccccgtcggcatatcgtgtttgtcctctccaaaatgacacagatacctacttaggtattccagcagacgtggcggcagttcttccagtagacgtggtgactgatcctaacatcttgctgggcatgcagacaacggtacacattgcggagctagtcaaggcatgtcatccgtcacccgatgttgtgagcgctgtaggggagcacctgaactggctcaacaaactcttactcccacttaaggaatcgactcagttgcaaggaagcgagtcgtacaaggagtgccttgcactcttgggtcgtgttcacgctgcgatgaagatggtgagaattggcttagtagtgccccagctgcaatacagaatgtacggtagcctcatcaaccaaatggcccaagtagcacaaaactacgaccgagaattcaagcaattcaaattattcatcatccaaaatcaaatccttggcagctatttgctgcagcagaacagggcatttgctgagagggagctgcagatggagagctttcatgctgctgtcatttctcaaagaagggaggagttggacaatacattcgcaaagatggaccgattgagcgggcaaatggaggcagagagtagtgcaatggagcaagccaaaaaggaaatggacgaaggattgaggcagttccagaataggcaagttgcgaacgccctctttgccgttcttagcgctgtagctcagattgggcttgcattccttacggctggtgcaacggctcctggagctgtggcgtcggcggggcaagctgtgagcatagcaggtcaggcggcgcaaggtctgcgaagggtggtggaaattctagagcagctggaggctgtgatggaggttgtggctgctgtgaaggacctcgtggattcattggaacaggtaggtcagattgtggacgcaccggtgatgccggaattgccctcagaggcggactggtccatttttgtgaacgaggtggaggccgtggcagagggcatgccaacggaagtctcggaggttccggtgtggctggccaggtgcaagaatgtggctgcactgggtcgggagatgagcatcacggcagtacagatgtcggagctgcagtatgacatctgggtgcaaggcatgatgcgggatatggctcgaagccaggcagacaggctggccgcaattcaacccgcggaccttaccaactatttggagatggctacccagatggatatgcggactacgaggatgctgctggggctcctcaacatattgcgcatccagaatgcggcgctcaggtacgagtatcttctaatgcccacggagctcacaacatggccactgggtatggataccgtgggtgacttgctcatcgcgcaggagaatgctgcactgataggattaatgcagctagggccctcatctgatttcacgagcaggcatgtggtgaaagacatacctgtgaacttgctgctcgatggcgaggattgggagtttgagattcctgtgcaagctggcatgtccagcttcccttccagctggtctcgcgtccgtattcggcacctggagatgcactttgtgaaggaggccagcggtattggtggtgagattatccaccagcctaccacccagactgggaccgtttacatccttctgcagggttccactatcttccatgaccgcagaagagaccaggtgttgccttttcaggccgctgctccgctcaactaccattacgcgtaccgcctcgacaccggcgactccactctcacaaacgaaccctctgaacagtttgccaacaagttcatgcagatgacacccttcacccgttggaggcttcgtctgtctgcgtccgcaaaagagaatgcaggattagcctttcccacggctacagcacttgactccactacccagattgtcatcactttccatgttacggccatcagacaaattgactggcggcacgacgaagag

SEQ ID NO: 382 - DNA, 2601 bp, synthetic construct
  misc_feature 1..2601: note = PtIP-83 polypeptide variant encoding polynucleotide
  source 1..2601: mol_type = other DNA
atggctctcgtggattacggcaagcttttcgaggatctgaaccagataagcatgggtgtactggatcgggtagagttttcagaggtgatggtgatccacaggatgtatgtgaggctagctgatctgaatgtggggcagctcgagggagccgagaaagtgaagcgcttgtatgtttttagcgacattatcgagctaccagtcgtggaatggcggtggccgccgcaaataccaggatcggtgacggtgatcatattgtgtcgtcttcttcaatggccaactgatgggaggcagtcggacaccgagctccacctgacattcatgaagttgcatgccatacaacgagaggaaaatcggtgggagataaccgcagcagatggcatgaactggggagtttacatacacgcagaggaagtacaggttggcgtgctgacaatgtcatggtcttcggtacttagagtttcggcacttcgctctgttataacctccggctttcgcgccgttagtgtgtttgaggtaccgggaagtgtaaggtccacccttggagctactttaaggcccgatcacgccttatatagtacaactatgcaagccacacccaacgcatcgcatattagtgcttttaaccttcgcatagtttccccgtcggcatatcgtgtttgtcctctccaaaatgacacagatacctacttaggtattccagcagacgtggcggcagttcttccagtagacgtggtgactgatcctaacatcttgctgggcatgcagacaacggtacacattgcggagctagtcaaggcatgtcatccgtcacccgatgttgtgagcgctgtaggggagcacctgaactggctcaacaaactcttactcccacttaaggaatcgactcagttgcaaggaagcgagtcgtacaaggagtgccttgcactcttgggtcgtgttcacgctgcgatgaagatggtgagaattggcttagtagtgccccagctgcaatacagaatgtacggtagcctcatcaaccaaatggcccaagtagcacaaaactacgaccgagaattcaagcaattcaaattattcatcatccaaaatcaaatccttggcagctatttgctgcagcagaacagggcatttgctgagagggagctgcagatggagagctttcatgctgctgtcatttctcaaagaagggaggagttggacaatacattcgcaaagatggaccgattgagcgggcaaatggaggcagagagtagtgcaatggagcaagccaaaaaggaaatggacgaaggattgaggcagttccagaataggcaagttgcgaacgccctctttgccgttcttagcgctgtagctcagattgggcttgcattccttacggctggtgcaacggctcctggagctgtggcgtcggcggggcaagctgtgagcatagcaggtcaggcggcgcaaggtctgcgaagggtggtggaaattctagagcagctggaggctgtgatggaggttgtggctgctgtgaaggacctcgtggattcattggaacaggtaggtcagattgtggacgcaccggtgatgccggaattgccctcagaggcggactggtccatttttgtgaacgaggtggaggccgtggcagagggcatgccaacggaagtctcggaggttccggtgtggatcggcaagtgcaagaatgtggctgcactgggtcgggagatgagcatcacggcagtacagatgtcggagctgcagtatgacatctgggtgcaaggcatgatgcgggatatggctcgaagccaggcagacaggctggccgcaattcaacccgcggaccttaccaactatttggagatggctacccagatggatatgcggactacgaggatgctgctggggctcctcaacatattgcgcatccagaatgcggcgctcaggtacgagtatcttctaatgcccacggagctcacaacatggccactgggtatggataccgtgggtgacttgctcatcgcgcaggagaatgctgcactgataggattaatgcagctagggccctcatctgatttcacgagcaggcatgtggtgaaagacatacctgtgaacttgctgctcgatggcgaggattgggagtttgagattcctgtgcaagctggcatgtccagcttcccttccagctggtctcgcgtccgtattcggcacctggagatgcactttgtgaaggaggccagcggtattggtggtgagattatccaccagcctaccacccagactgggaccgtttacatccttctgcagggttccactatcttccatgaccgcagaagagaccaggtgttgccttttcaggccgctgctccgctcaactaccattacgcgtaccgcctcgacaccggcgactccactctcacaaacgaaccctctgaacagtttgccaacaagttcatgcagatgacacccttcacccgttggaggcttcgtctgtctgcgtccgcaaaagagaatgcaggattagcctttcccacggctacagcacttgactccactacccagattgtcatcactttccatgttacggccatcagacaaattgactggcggcacgacgaagag

SEQ ID NO: 383 - DNA, 2601 bp, synthetic construct
  misc_feature 1..2601: note = PtIP-83 polypeptide variant encoding polynucleotide
  source 1..2601: mol_type = other DNA
atggctctcgtggattacggcaagcttttcgaggatctgaaccagataagcatgggtgtactggatcgggtagagttttcagaggtgatggtgatccacaggatgtatgtgaggctagctgatctgaatgtggggcagctcgagggagccgagaaagtgaagcgcttgtatgtttttagcgacattatcgagctaccagtcgtggaatggcggtggccgccgcaaataccaggatcggtgacggtgatcatattgtgtcgtcttcttcaatggccaactgatgggaggcagtcggacaccgagctccacctgacattcatgaagttgcatgccatacaacgagaggaaaatcggtgggagataaccgcagcagatggcatgaactggggagtttacatacacgcagaggaagtacaggttggcgtgctgacaatgtcatggtcttcggtacttagagtttcggcacttcgctctgttataacctccggctttcgcgccgttagtgtgtttgaggtaccgggaagtgtaaggtccacccttggagctactttaaggcccgatcacgccttatatagtacaactatgcaagccacacccaacgcatcgcatattagtgcttttaaccttcgcatagtttccccgtcggcatatcgtgtttgtcctctccaaaatgacacagatacctacttaggtattccagcagacgtggcggcagttcttccagtagacgtggtgactgatcctaacatcttgctgggcatgcagacaacggtacacattgcggagctagtcaaggcatgtcatccgtcacccgatgttgtgagcgctgtaggggagcacctgaactggctcaacaaactcttactcccacttaaggaatcgactcagttgcaaggaagcgagtcgtacaaggagtgccttgcactcttgggtcgtgttcacgctgcgatgaagatggtgagaattggcttagtagtgccccagctgcaatacagaatgtacggtagcctcatcaaccaaatggcccaagtagcacaaaactacgaccgagaattcaagcaattcaaattattcatcatccaaaatcaaatccttggcagctatttgctgcagcagaacagggcatttgctgagagggagctgcagatggagagctttcatgctgctgtcatttctcaaagaagggaggagttggacaatacattcgcaaagatggaccgattgagcgggcaaatggaggcagagagtagtgcaatggagcaagccaaaaaggaaatggacgaaggattgaggcagttccagaataggcaagttgcgaacgccctctttgccgttcttagcgctgtagctcagattgggcttgcattccttacggctggtgcaacggctcctggagctgtggcgtcggcggggcaagctgtgagcatagcaggtcaggcggcgcaaggtctgcgaagggtggtggaaattctagagcagctggaggctgtgatggaggttgtggctgctgtgaaggacctcgtggattcattggaacaggtaggtcagattgtggacgcaccggtgatgccggaattgccctcagaggcggactggtccatttttgtgaacgaggtggaggccgtggcagagggcatgccaacggaagtctcggaggttccggtgtggaggggccggtgcaagaccgtggctgcactgggtcgggagatgagcatcacggcagtacagatgtcggagctgcagtatgacatctgggtgcaaggcatgatgcgggatatggctcgaagccaggcagacaggctggccgcaattcaacccgcggaccttaccaactatttggagatggctacccagatggatatgcggactacgaggatgctgctggggctcctcaacatattgcgcatccagaatgcggcgctcaggtacgagtatcttctaatgcccacggagctcacaacatggccactgggtatggataccgtgggtgacttgctcatcgcgcaggagaatgctgcactgataggattaatgcagctagggccctcatctgatttcacgagcaggcatgtggtgaaagacatacctgtgaacttgctgctcgatggcgaggattgggagtttgagattcctgtgcaagctggcatgtccagcttcccttccagctggtctcgcgtccgtattcggcacctggagatgcactttgtgaaggaggccagcggtattggtggtgagattatccaccagcctaccacccagactgggaccgtttacatccttctgcagggttccactatcttccatgaccgcagaagagaccaggtgttgccttttcaggccgctgctccgctcaactaccattacgcgtaccgcctcgacaccggcgactccactctcacaaacgaaccctctgaacagtttgccaacaagttcatgcagatgacacccttcacccgttggaggcttcgtctgtctgcgtccgcaaaagagaatgcaggattagcctttcccacggctacagcacttgactccactacccagattgtcatcactttccatgttacggccatcagacaaattgactggcggcacgacgaagag

SEQ ID NO: 384 - DNA, 2601 bp, synthetic construct
  misc_feature 1..2601: note = PtIP-83 polypeptide variant encoding polynucleotide
  source 1..2601: mol_type = other DNA
atggctctcgtggattacggcaagcttttcgaggatctgaaccagataagcatgggtgtactggatcgggtagagttttcagaggtgatggtgatccacaggatgtatgtgaggctagctgatctgaatgtggggcagctcgagggagccgagaaagtgaagcgcttgtatgttttttccgacgttatcgagctaccagtcgtggaatggcggtggccgccgcaaataccaggatcggtgacggtgatcatattgtgtcgtcttcttcaatggccaactgatgggaggcagtcggacaccgagctccacctgacattcatgaagttgcatgccatacaacgagaggaaaatcggtgggagataaccgcagcagatggcatgaactggggagtttacatacacgcagaggaagtacaggttggcgtgctgacaatgtcatggtcttcggtacttagagtttcggcacttcgctctgttataacctccggctttcgcgccgttagtgtgtttgaggtaccgggaagtgtaaggtccacccttggagctactttaaggcccgatcacgccttatatagtacaactatgcaagccacacccaacgcatcgcatattagtgcttttaaccttcgcatagtttccccgtcggcatatcgtgtttgtcctctccaaaatgacacagatacctacttaggtattccagcagacgtggcggcagttcttccagtagacgtggtgactgatcctaacatcttgctgggcatgcagacaacggtacacattgcggagctagtcaaggcatgtcatccgtcacccgatgttgtgagcgctgtaggggagcacctgaactggctcaacaaactcttactcccacttaaggaatcgactcagttgcaaggaagcgagtcgtacaaggagtgccttgcactcttgggtcgtgttcacgctgcgatgaagatggtgagaattggcttagtagtgccccagctgcaatacagaatgtacggtagcctcatcaaccaaatggcccaagtagcacaaaactacgaccgagaattcaagcaattcaaattattcatcatccaaaatcaaatccttggcagctatttgctgcagcagaacagggcatttgctgagagggagctgcagatggagagctttcatgctgctgtcatttctcaaagaagggaggagttggacaatacattcgcaaagatggaccgattgagcgggcaaatggaggcagagagtagtgcaatggagcaagccaaaaaggaaatggacgaaggattgaggcagttccagaataggcaagttgcgaacgccctctttgccgttcttagcgctgtagctcagattgggcttgcattccttacggctggtgcaacggctcctggagctgtggcgtcggcggggcaagctgtgagcatagcaggtcaggcggcgcaaggtctgcgaagggtggtggaaattctagagcagctggaggctgtgatggaggttgtggctgctgtgaaggacctcgtggattcattggaacaggtaggtcagattgtggacgcaccggtgatgccggaattgccctcagaggcggactggtccatttttgtgaacgaggtggaggccgtggcagagggcatgccaacggaagtctcggaggttccggtgtggaggggcaagtgcaagagcgtggctgcactgggtcgggagatgagcatcacggcagtacagatgtcggagctgcagtatgacatctgggtgcaaggcatgatgcgggatatggctcgaagccaggcagacaggctggccgcaattcaacccgcggaccttaccaactatttggagatggctacccagatggatatgcggactacgaggatgctgctggggctcctcaacatattgcgcatccagaatgcggcgctcaggtacgagtatcttctaatgcccacggagctcacaacatggccactgggtatggataccgtgggtgacttgctcatcgcgcaggagaatgctgcactgataggattaatgcagctagggccctcatctgatttcacgagcaggcatgtggtgaaagacatacctgtgaacttgctgctcgatggcgaggattgggagtttgagattcctgtgcaagctggcatgtccagcttcccttccagctggtctcgcgtccgtattcggcacctggagatgcactttgtgaaggaggccagcggtattggtggtgagattatccaccagcctaccacccagactgggaccgtttacatccttctgcagggttccactatcttccatgaccgcagaagagaccaggtgttgccttttcaggccgctgctccgctcaactaccattacgcgtaccgcctcgacaccggcgactccactctcacaaacgaaccctctgaacagtttgccaacaagttcatgcagatgacacccttcacccgttggaggcttcgtctgtctgcgtccgcaaaagagaatgcaggattagcctttcccacggctacagcacttgactccactacccagattgtcatcactttccatgttacggccatcagacaaattgactggcggcacgacgaagag

SEQ ID NO: 385 - DNA, 2601 bp, synthetic construct
  misc_feature 1..2601: note = PtIP-83 polypeptide variant encoding polynucleotide
  source 1..2601: mol_type = other DNA
atggctctcgtggattacggcaagcttttcgaggatctgaaccagataagcatgggtgtactggatcgggtagagttttcagaggtgatggtgatccacaggatgtatgtgaggctagctgatctgaatgtggggcagctcgagggagccgagaaagtgaagcgcttgtatgttttttccgacgttatcgagctaccagtcgtggaatggcggtggccgccgcaaataccaggatcggtgacggtgatcatattgtgtcgtcttcttcaatggccaactgatgggaggcagtcggacaccgagctccacctgacattcatgaagttgcatgccatacaacgagaggaaaatcggtgggagataaccgcagcagatggcatgaactggggagtttacatacacgcagaggaagtacaggttggcgtgctgacaatgtcatggtcttcggtacttagagtttcggcacttcgctctgttataacctccggctttcgcgccgttagtgtgtttgaggtaccgggaagtgtaaggtccacccttggagctactttaaggcccgatcacgccttatatagtacaactatgcaagccacacccaacgcatcgcatattagtgcttttaaccttcgcatagtttccccgtcggcatatcgtgtttgtcctctccaaaatgacacagatacctacttaggtattccagcagacgtggcggcagttcttccagtagacgtggtgactgatcctaacatcttgctgggcatgcagacaacggtacacattgcggagctagtcaaggcatgtcatccgtcacccgatgttgtgagcgctgtaggggagcacctgaactggctcaacaaactcttactcccacttaaggaatcgactcagttgcaaggaagcgagtcgtacaaggagtgccttgcactcttgggtcgtgttcacgctgcgatgaagatggtgagaattggcttagtagtgccccagctgcaatacagaatgtacggtagcctcatcaaccaaatggcccaagtagcacaaaactacgaccgagaattcaagcaattcaaattattcatcatccaaaatcaaatccttggcagctatttgctgcagcagaacagggcatttgctgagagggagctgcagatggagagctttcatgctgctgtcatttctcaaagaagggaggagttggacaatacattcgcaaagatggaccgattgagcgggcaaatggaggcagagagtagtgcaatggagcaagccaaaaaggaaatggacgaaggattgaggcagttccagaataggcaagttgcgaacgccctctttgccgttcttagcgctgtagctcagattgggcttgcattccttacggctggtgcaacggctcctggagctgtggcgtcggcggggcaagctgtgagcatagcaggtcaggcggcgcaaggtctgcgaagggtggtggaaattctagagcagctggaggctgtgatggaggttgtggctgctgtgaaggacctcgtggattcattggaacaggtaggtcagattgtggacgcaccggtgatgccggaattgccctcagaggcggactggtccatttttgtgaacgaggtggaggccgtggcagagggcatgccaacggaagtctcggaggttccggtgtggagggtcaagtgcaagaatgtggctgcactgggtcgggagatgagcatcacggcagtacagatgtcggagctgcagtatgacatctgggtgcaaggcatgatgcgggatatggctcgaagccaggcagacaggctggccgcaattcaacccgcggaccttaccaactatttggagatggctacccagatggatatgcggactacgaggatgctgctggggctcctcaacatattgcgcatccagaatgcggcgctcaggtacgagtatcttctaatgcccacggagctcacaacatggccactgggtatggataccgtgggtgacttgctcatcgcgcaggagaatgctgcactgataggattaatgcagctagggccctcatctgatttcacgagcaggcatgtggtgaaagacatacctgtgaacttgctgctcgatggcgaggattgggagtttgagattcctgtgcaagctggcatgtccagcttcccttccagctggtctcgcgtccgtattcggcacctggagatgcactttgtgaaggaggccagcggtattggtggtgagattatccaccagcctaccacccagactgggaccgtttacatccttctgcagggttccactatcttccatgaccgcagaagagaccaggtgttgccttttcaggccgctgctccgctcaactaccattacgcgtaccgcctcgacaccggcgactccactctcacaaacgaaccctctgaacagtttgccaacaagttcatgcagatgacacccttcacccgttggaggcttcgtctgtctgcgtccgcaaaagagaatgcaggattagcctttcccacggctacagcacttgactccactacccagattgtcatcactttccatgttacggccatcagacaaattgactggcggcacgacgaagag

SEQ ID NO: 386 - DNA, 2601 bp, synthetic construct
  misc_feature 1..2601: note = PtIP-83 polypeptide variant encoding polynucleotide
  source 1..2601: mol_type = other DNA
atggctctcgtggattacggcaagcttttcgaggatctgaaccagataagcatgggtgtactggatcgggtagagttttcagaggtgatggtgatccacaggatgtatgtgaggctagctgatctgaatgtggggcagctcgagggagccgagaaagtgatgcggttgtatatttttgccgacgttgtcgagctaccagtcgtggaatggcggtggccgccgcaaataccaggatcggtgacggtgatcatattgtgtcgtcttcttcaatggccaactgatgggaggcagtcggacaccgagctccacctgacattcatgaagttgcatgccatacaacgagaggaaaatcggtgggagataaccgcagcagatggcatgaactggggagtttacatacacgcagaggaagtacaggttggcgtgctgacaatgtcatggtcttcggtacttagagtttcggcacttcgctctgttataacctccggctttcgcgccgttagtgtgtttgaggtaccgggaagtgtaaggtccacccttggagctactttaaggcccgatcacgccttatatagtacaactatgcaagccacacccaacgcatcgcatattagtgcttttaaccttcgcatagtttccccgtcggcatatcgtgtttgtcctctccaaaatgacacagatacctacttaggtattccagcagacgtggcggcagttcttccagtagacgtggtgactgatcctaacatcttgctgggcatgcagacaacggtacacattgcggagctagtcaaggcatgtcatccgtcacccgatgttgtgagcgctgtaggggagcacctgaactggctcaacaaactcttactcccacttaaggaatcgactcagttgcaaggaagcgagtcgtacaaggagtgccttgcactcttgggtcgtgttcacgctgcgatgaagatggtgagaattggcttagtagtgccccagctgcaatacagaatgtacggtagcctcatcaaccaaatggcccaagtagcacaaaactacgaccgagaattcaagcaattcaaattattcatcatccaaaatcaaatccttggcagctatttgctgcagcagaacagggcatttgctgagagggagctgcagatggagagctttcatgctgctgtcatttctcaaagaagggaggagttggacaatacattcgcaaagatggaccgattgagcgggcaaatggaggcagagagtagtgcaatggagcaagccaaaaaggaaatggacgaaggattgaggcagttccagaataggcaagttgcgaacgccctctttgccgttcttagcgctgtagctcagattgggcttgcattccttacggctggtgcaacggctcctggagctgtggcgtcggcggggcaagctgtgagcatagcaggtcaggcggcgcaaggtctgcgaagggtggtggaaattctagagcagctggaggctgtgatggaggttgtggctgctgtgaaggacctcgtggattcattggaacaggtaggtcagattgtggacgcaccggtgatgccggaattgccctcagaggcggactggtccatttttgtgaacgaggtggaggccgtggcagagggcatgccaacggaagtctcggaggttccggtgtggaggggcaagtgcaagagcgtggctgcactgggtcgggagatgagcatcacggcagtacagatgtcggagctgcagtatgacatctgggtgcaaggcatgatgcgggatatggctcgaagccaggcagacaggctggccgcaattcaacccgcggaccttaccaactatttggagatggctacccagatggatatgcggactacgaggatgctgctggggctcctcaacatattgcgcatccagaatgcggcgctcaggtacgagtatcttctaatgcccacggagctcacaacatggccactgggtatggataccgtgggtgacttgctcatcgcgcaggagaatgctgcactgataggattaatgcagctagggccctcatctgatttcacgagcaggcatgtggtgaaagacatacctgtgaacttgctgctcgatggcgaggattgggagtttgagattcctgtgcaagctggcatgtccagcttcccttccagctggtctcgcgtccgtattcggcacctggagatgcactttgtgaaggaggccagcggtattggtggtgagattatccaccagcctaccacccagactgggaccgtttacatccttctgcagggttccactatcttccatgaccgcagaagagaccaggtgttgccttttcaggccgctgctccgctcaactaccattacgcgtaccgcctcgacaccggcgactccactctcacaaacgaaccctctgaacagtttgccaacaagttcatgcagatgacacccttcacccgttggaggcttcgtctgtctgcgtccgcaaaagagaatgcaggattagcctttcccacggctacagcacttgactccactacccagattgtcatcactttccatgttacggccatcagacaaattgactggcggcacgacgaagag

SEQ ID NO: 387 - DNA, 2601 bp, synthetic construct
  misc_feature 1..2601: note = PtIP-83 polypeptide variant encoding polynucleotide
  source 1..2601: mol_type = other DNA
atggctctcgtggattacggcaagcttttcgaggatctgaaccagataagcatgggtgtactggatcgggtagagttttcagaggtgatggtgatccacaggatgtatgtgaggctagctgatctgaatgtggggcagctcgagggagccgagaaagtgaggcacttgtatattttttgcgacgttatcgagctaccagtcgtggaatggcggtggccgccgcaaataccaggatcggtgacggtgatcatattgtgtcgtcttcttcaatggccaactgatgggaggcagtcggacaccgagctccacctgacattcatgaagttgcatgccatacaacgagaggaaaatcggtgggagataaccgcagcagatggcatgaactggggagtttacatacacgcagaggaagtacaggttggcgtgctgacaatgtcatggtcttcggtacttagagtttcggcacttcgctctgttataacctccggctttcgcgccgttagtgtgtttgaggtaccgggaagtgtaaggtccacccttggagctactttaaggcccgatcacgccttatatagtacaactatgcaagccacacccaacgcatcgcatattagtgcttttaaccttcgcatagtttccccgtcggcatatcgtgtttgtcctctccaaaatgacacagatacctacttaggtattccagcagacgtggcggcagttcttccagtagacgtggtgactgatcctaacatcttgctgggcatgcagacaacggtacacattgcggagctagtcaaggcatgtcatccgtcacccgatgttgtgagcgctgtaggggagcacctgaactggctcaacaaactcttactcccacttaaggaatcgactcagttgcaaggaagcgagtcgtacaaggagtgccttgcactcttgggtcgtgttcacgctgcgatgaagatggtgagaattggcttagtagtgccccagctgcaatacagaatgtacggtagcctcatcaaccaaatggcccaagtagcacaaaactacgaccgagaattcaagcaattcaaattattcatcatccaaaatcaaatccttggcagctatttgctgcagcagaacagggcatttgctgagagggagctgcagatggagagctttcatgctgctgtcatttctcaaagaagggaggagttggacaatacattcgcaaagatggaccgattgagcgggcaaatggaggcagagagtagtgcaatggagcaagccaaaaaggaaatggacgaaggattgaggcagttccagaataggcaagttgcgaacgccctctttgccgttcttagcgctgtagctcagattgggcttgcattccttacggctggtgcaacggctcctggagctgtggcgtcggcggggcaagctgtgagcatagcaggtcaggcggcgcaaggtctgcgaagggtggtggaaattctagagcagctggaggctgtgatggaggttgtggctgctgtgaaggacctcgtggattcattggaacaggtaggtcagattgtggacgcaccggtgatgccggaattgccctcagaggcggactggtccatttttgtgaacgaggtggaggccgtggcagagggcatgccaacggaagtctcggaggttccggtgtggatcggcaagtgcaagaatgtggctgcactgggtcgggagatgagcatcacggcagtacagatgtcggagctgcagtatgacatctgggtgcaaggcatgatgcgggatatggctcgaagccaggcagacaggctggccgcaattcaacccgcggaccttaccaactatttggagatggctacccagatggatatgcggactacgaggatgctgctggggctcctcaacatattgcgcatccagaatgcggcgctcaggtacgagtatcttctaatgcccacggagctcacaacatggccactgggtatggataccgtgggtgacttgctcatcgcgcaggagaatgctgcactgataggattaatgcagctagggccctcatctgatttcacgagcaggcatgtggtgaaagacatacctgtgaacttgctgctcgatggcgaggattgggagtttgagattcctgtgcaagctggcatgtccagcttcccttccagctggtctcgcgtccgtattcggcacctggagatgcactttgtgaaggaggccagcggtattggtggtgagattatccaccagcctaccacccagactgggaccgtttacatccttctgcagggttccactatcttccatgaccgcagaagagaccaggtgttgccttttcaggccgctgctccgctcaactaccattacgcgtaccgcctcgacaccggcgactccactctcacaaacgaaccctctgaacagtttgccaacaagttcatgcagatgacacccttcacccgttggaggcttcgtctgtctgcgtccgcaaaagagaatgcaggattagcctttcccacggctacagcacttgactccactacccagattgtcatcactttccatgttacggccatcagacaaattgactggcggcacgacgaagag

SEQ ID NO: 388 - DNA, 2601 bp, synthetic construct
  misc_feature 1..2601: note = PtIP-83 polypeptide variant encoding polynucleotide
  source 1..2601: mol_type = other DNA
atggctctcgtggattacggcaagcttttcgaggatctgaaccagataagcatgggtgtactggatcgggtagagttttcagaggtgatggtgatccacaggatgtatgtgaggctagctgatctgaatgtggggcagctcgagggagccgagaaagtgaggcacttgtatatttttagcgacgttgtcgagctaccagtcgtggaatggcggtggccgccgcaaataccaggatcggtgacggtgatcatattgtgtcgtcttcttcaatggccaactgatgggaggcagtcggacaccgagctccacctgacattcatgaagttgcatgccatacaacgagaggaaaatcggtgggagataaccgcagcagatggcatgaactggggagtttacatacacgcagaggaagtacaggttggcgtgctgacaatgtcatggtcttcggtacttagagtttcggcacttcgctctgttataacctccggctttcgcgccgttagtgtgtttgaggtaccgggaagtgtaaggtccacccttggagctactttaaggcccgatcacgccttatatagtacaactatgcaagccacacccaacgcatcgcatattagtgcttttaaccttcgcatagtttccccgtcggcatatcgtgtttgtcctctccaaaatgacacagatacctacttaggtattccagcagacgtggcggcagttcttccagtagacgtggtgactgatcctaacatcttgctgggcatgcagacaacggtacacattgcggagctagtcaaggcatgtcatccgtcacccgatgttgtgagcgctgtaggggagcacctgaactggctcaacaaactcttactcccacttaaggaatcgactcagttgcaaggaagcgagtcgtacaaggagtgccttgcactcttgggtcgtgttcacgctgcgatgaagatggtgagaattggcttagtagtgccccagctgcaatacagaatgtacggtagcctcatcaaccaaatggcccaagtagcacaaaactacgaccgagaattcaagcaattcaaattattcatcatccaaaatcaaatccttggcagctatttgctgcagcagaacagggcatttgctgagagggagctgcagatggagagctttcatgctgctgtcatttctcaaagaagggaggagttggacaatacattcgcaaagatggaccgattgagcgggcaaatggaggcagagagtagtgcaatggagcaagccaaaaaggaaatggacgaaggattgaggcagttccagaataggcaagttgcgaacgccctctttgccgttcttagcgctgtagctcagattgggcttgcattccttacggctggtgcaacggctcctggagctgtggcgtcggcggggcaagctgtgagcatagcaggtcaggcggcgcaaggtctgcgaagggtggtggaaattctagagcagctggaggctgtgatggaggttgtggctgctgtgaaggacctcgtggattcattggaacaggtaggtcagattgtggacgcaccggtgatgccggaattgccctcagaggcggactggtccatttttgtgaacgaggtggaggccgtggcagagggcatgccaacggaagtctcggaggttccggtgtggatggtcaagtgcaagaatgtggctgcactgggtcgggagatgagcatcacggcagtacagatgtcggagctgcagtatgacatctgggtgcaaggcatgatgcgggatatggctcgaagccaggcagacaggctggccgcaattcaacccgcggaccttaccaactatttggagatggctacccagatggatatgcggactacgaggatgctgctggggctcctcaacatattgcgcatccagaatgcggcgctcaggtacgagtatcttctaatgcccacggagctcacaacatggccactgggtatggataccgtgggtgacttgctcatcgcgcaggagaatgctgcactgataggattaatgcagctagggccctcatctgatttcacgagcaggcatgtggtgaaagacatacctgtgaacttgctgctcgatggcgaggattgggagtttgagattcctgtgcaagctggcatgtccagcttcccttccagctggtctcgcgtccgtattcggcacctggagatgcactttgtgaaggaggccagcggtattggtggtgagattatccaccagcctaccacccagactgggaccgtttacatccttctgcagggttccactatcttccatgaccgcagaagagaccaggtgttgccttttcaggccgctgctccgctcaactaccattacgcgtaccgcctcgacaccggcgactccactctcacaaacgaaccctctgaacagtttgccaacaagttcatgcagatgacacccttcacccgttggaggcttcgtctgtctgcgtccgcaaaagagaatgcaggattagcctttcccacggctacagcacttgactccactacccagattgtcatcactttccatgttacggccatcagacaaattgactggcggcacgacgaagag

SEQ ID NO: 389 - DNA, 2601 bp, synthetic construct
  misc_feature 1..2601: note = PtIP-83 polypeptide variant encoding polynucleotide
  source 1..2601: mol_type = other DNA
atggctctcgtggattacggcaagcttttcgaggatctgaaccagataagcatgggtgtactggatcgggtagagttttcagaggtgatggtgatccacaggatgtatgtgaggctagctgatctgaatgtggggcagctcgagggagccgagaaagtgaggcacttgtatatttttagcgacgttgtcgagctaccagtcgtggaatggcggtggccgccgcaaataccaggatcggtgacggtgatcatattgtgtcgtcttcttcaatggccaactgatgggaggcagtcggacaccgagctccacctgacattcatgaagttgcatgccatacaacgagaggaaaatcggtgggagataaccgcagcagatggcatgaactggggagtttacatacacgcagaggaagtacaggttggcgtgctgacaatgtcatggtcttcggtacttagagtttcggcacttcgctctgttataacctccggctttcgcgccgttagtgtgtttgaggtaccgggaagtgtaaggtccacccttggagctactttaaggcccgatcacgccttatatagtacaactatgcaagccacacccaacgcatcgcatattagtgcttttaaccttcgcatagtttccccgtcggcatatcgtgtttgtcctctccaaaatgacacagatacctacttaggtattccagcagacgtggcggcagttcttccagtagacgtggtgactgatcctaacatcttgctgggcatgcagacaacggtacacattgcggagctagtcaaggcatgtcatccgtcacccgatgttgtgagcgctgtaggggagcacctgaactggctcaacaaactcttactcccacttaaggaatcgactcagttgcaaggaagcgagtcgtacaaggagtgccttgcactcttgggtcgtgttcacgctgcgatgaagatggtgagaattggcttagtagtgccccagctgcaatacagaatgtacggtagcctcatcaaccaaatggcccaagtagcacaaaactacgaccgagaattcaagcaattcaaattattcatcatccaaaatcaaatccttggcagctatttgctgcagcagaacagggcatttgctgagagggagctgcagatggagagctttcatgctgctgtcatttctcaaagaagggaggagttggacaatacattcgcaaagatggaccgattgagcgggcaaatggaggcagagagtagtgcaatggagcaagccaaaaaggaaatggacgaaggattgaggcagttccagaataggcaagttgcgaacgccctctttgccgttcttagcgctgtagctcagattgggcttgcattccttacggctggtgcaacggctcctggagctgtggcgtcggcggggcaagctgtgagcatagcaggtcaggcggcgcaaggtctgcgaagggtggtggaaattctagagcagctggaggctgtgatggaggttgtggctgctgtgaatgacctcgtggattcattggaacaggtaggtcagattgtggacgcaccggtgatgccggaattgccctcagaggcggactggtccatttttgtgaacgaggtggaggccgtggcagagggcatgccaacggaagtctcggaggttccggtgtggaggggcaagtgcaagagcgtggctgcactgggtcgggagatgagcatcacggcagtacagatgtcggagctgcagtatgacatctgggtgcaaggcatgatgcgggatatggctcgaagccaggcagacaggctggccgcaattcaacccgcggaccttaccaactatttggagatggctacccagatggatatgcggactacgaggatgctgctggggctcctcaacatattgcgcatccagaatgcggcgctcaggtacgagtatcttctaatgcccacggagctcacaacatggccactgggtatggataccgtgggtgacttgctcatcgcgcaggagaatgctgcactgataggattaatgcagctagggccctcatctgatttcacgagcaggcatgtggtgaaagacatacctgtgaacttgctgctcgatggcgaggattgggagtttgagattcctgtgcaagctggcatgtccagcttcccttccagctggtctcgcgtccgtattcggcacctggagatgcactttgtgaaggaggccagcggtattggtggtgagattatccaccagcctaccacccagactgggaccgtttacatccttctgcagggttccactatcttccatgaccgcagaagagaccaggtgttgccttttcaggccgctgctccgctcaactaccattacgcgtaccgcctcgacaccggcgactccactctcacaaacgaaccctctgaacagtttgccaacaagttcatgcagatgacacccttcacccgttggaggcttcgtctgtctgcgtccgcaaaagagaatgcaggattagcctttcccacggctacagcacttgactccactacccagattgtcatcactttccatgttacggccatcagacaaattgactggcggcacgacgaagag

SEQ ID NO: 390 - DNA, 2601 bp, synthetic construct
  misc_feature 1..2601: note = PtIP-83 polypeptide variant encoding polynucleotide
  source 1..2601: mol_type = other DNA
atggctctcgtggattacggcaagcttttcgaggatctgaaccagataagcatgggtgtactggatcgggtagagttttcagaggtgatggtgatccacaggatgtatgtgaggctagctgatctgaatgtggggcagctcgagggagccgagaaagtgaggcagttgtatgttttttgcgacgttctcgtgctaccagtcgtggaatggcggtggccgccgcaaataccaggatcggtgacggtgatcatattgtgtcgtcttcttcaatggccaactgatgggaggcagtcggacaccgagctccacctgacattcatgaagttgcatgccatacaacgagaggaaaatcggtgggagataaccgcagcagatggcatgaactggggagtttacatacacgcagaggaagtacaggttggcgtgctgacaatgtcatggtcttcggtacttagagtttcggcacttcgctctgttataacctccggctttcgcgccgttagtgtgtttgaggtaccgggaagtgtaaggtccacccttggagctactttaaggcccgatcacgccttatatagtacaactatgcaagccacacccaacgcatcgcatattagtgcttttaaccttcgcatagtttccccgtcggcatatcgtgtttgtcctctccaaaatgacacagatacctacttaggtattccagcagacgtggcggcagttcttccagtagacgtggtgactgatcctaacatcttgctgggcatgcagacaacggtacacattgcggagctagtcaaggcatgtcatccgtcacccgatgttgtgagcgctgtaggggagcacctgaactggctcaacaaactcttactcccacttaaggaatcgactcagttgcaaggaagcgagtcgtacaaggagtgccttgcactcttgggtcgtgttcacgctgcgatgaagatggtgagaattggcttagtagtgccccagctgcaatacagaatgtacggtagcctcatcaaccaaatggcccaagtagcacaaaactacgaccgagaattcaagcaattcaaattattcatcatccaaaatcaaatccttggcagctatttgctgcagcagaacagggcatttgctgagagggagctgcagatggagagctttcatgctgctgtcatttctcaaagaagggaggagttggacaatacattcgcaaagatggaccgattgagcgggcaaatggaggcagagagtagtgcaatggagcaagccaaaaaggaaatggacgaaggattgaggcagttccagaataggcaagttgcgaacgccctctttgccgttcttagcgctgtagctcagattgggcttgcattccttacggctggtgcaacggctcctggagctgtggcgtcggcggggcaagctgtgagcatagcaggtcaggcggcgcaaggtctgcgaagggtggtggaaattctagagcagctggaggctgtgatggaggttgtggctgctgtgaaggacctcgtggattcattggaacaggtaggtcagattgtggacgcaccggtgatgccggaattgccctcagaggcggactggtccatttttgtgaacgaggtggaggccgtggcagagggcatgccaacggaagtctcggaggttccggtgtggcacggcaagtgcaagaatgtggctgcactgggtcgggagatgagcatcacggcagtacagatgtcggagctgcagtatgacatctgggtgcaaggcatgatgcgggatatggctcgaagccaggcagacaggctggccgcaattcaacccgcggaccttaccaactatttggagatggctacccagatggatatgcggactacgaggatgctgctggggctcctcaacatattgcgcatccagaatgcggcgctcaggtacgagtatcttctaatgcccacggagctcacaacatggccactgggtatggataccgtgggtgacttgctcatcgcgcaggagaatgctgcactgataggattaatgcagctagggccctcatctgatttcacgagcaggcatgtggtgaaagacatacctgtgaacttgctgctcgatggcgaggattgggagtttgagattcctgtgcaagctggcatgtccagcttcccttccagctggtctcgcgtccgtattcggcacctggagatgcactttgtgaaggaggccagcggtattggtggtgagattatccaccagcctaccacccagactgggaccgtttacatccttctgcagggttccactatcttccatgaccgcagaagagaccaggtgttgccttttcaggccgctgctccgctcaactaccattacgcgtaccgcctcgacaccggcgactccactctcacaaacgaaccctctgaacagtttgccaacaagttcatgcagatgacacccttcacccgttggaggcttcgtctgtctgcgtccgcaaaagagaatgcaggattagcctttcccacggctacagcacttgactccactacccagattgtcatcactttccatgttacggccatcagacaaattgactggcggcacgacgaagag

SEQ ID NO: 391 - DNA, 2601 bp, synthetic construct
  misc_feature 1..2601: note = PtIP-83 polypeptide variant encoding polynucleotide
  source 1..2601: mol_type = other DNA
atggctctcgtggattacggcaagcttttcgaggatctgaaccagataagcatgggtgtactggatcgggtagagttttcagaggtgatggtgatccacaggatgtatgtgaggctagctgatctgaatgtggggcagctcgagggagccgagaaagtgaggcagttgtatgttttttgcgacgttctcgtgctaccagtcgtggaatggcggtggccgccgcaaataccaggatcggtgacggtgatcatattgtgtcgtcttcttcaatggccaactgatgggaggcagtcggacaccgagctccacctgacattcatgaagttgcatgccatacaacgagaggaaaatcggtgggagataaccgcagcagatggcatgaactggggagtttacatacacgcagaggaagtacaggttggcgtgctgacaatgtcatggtcttcggtacttagagtttcggcacttcgctctgttataacctccggctttcgcgccgttagtgtgtttgaggtaccgggaagtgtaaggtccacccttggagctactttaaggcccgatcacgccttatatagtacaactatgcaagccacacccaacgcatcgcatattagtgcttttaaccttcgcatagtttccccgtcggcatatcgtgtttgtcctctccaaaatgacacagatacctacttaggtattccagcagacgtggcggcagttcttccagtagacgtggtgactgatcctaacatcttgctgggcatgcagacaacggtacacattgcggagctagtcaaggcatgtcatccgtcacccgatgttgtgagcgctgtaggggagcacctgaactggctcaacaaactcttactcccacttaaggaatcgactcagttgcaaggaagcgagtcgtacaaggagtgccttgcactcttgggtcgtgttcacgctgcgatgaagatggtgagaattggcttagtagtgccccagctgcaatacagaatgtacggtagcctcatcaaccaaatggcccaagtagcacaaaactacgaccgagaattcaagcaattcaaattattcatcatccaaaatcaaatccttggcagctatttgctgcagcagaacagggcatttgctgagagggagctgcagatggagagctttcatgctgctgtcatttctcaaagaagggaggagttggacaatacattcgcaaagatggaccgattgagcgggcaaatggaggcagagagtagtgcaatggagcaagccaaaaaggaaatggacgaaggattgaggcagttccagaataggcaagttgcgaacgccctctttgccgttcttagcgctgtagctcagattgggcttgcattccttacggctggtgcaacggctcctggagctgtggcgtcggcggggcaagctgtgagcatagcaggtcaggcggcgcaaggtctgcgaagggtggtggaaattctagagcagctggaggctgtgatggaggttgtggctgctgtgaaggacctcgtggattcattggaacaggtaggtcagattgtggacgcaccggtgatgccggaattgccctcagaggcggactggtccatttttgtgaacgaggtggaggccgtggcagagggcatgccaacggaagtctcggaggttccggtgtggctgggccggtgcaagaatgtggctgcactgggtcgggagatgagcatcacggcagtacagatgtcggagctgcagtatgacatctgggtgcaaggcatgatgcgggatatggctcgaagccaggcagacaggctggccgcaattcaacccgcggaccttaccaactatttggagatggctacccagatggatatgcggactacgaggatgctgctggggctcctcaacatattgcgcatccagaatgcggcgctcaggtacgagtatcttctaatgcccacggagctcacaacatggccactgggtatggataccgtgggtgacttgctcatcgcgcaggagaatgctgcactgataggattaatgcagctagggccctcatctgatttcacgagcaggcatgtggtgaaagacatacctgtgaacttgctgctcgatggcgaggattgggagtttgagattcctgtgcaagctggcatgtccagcttcccttccagctggtctcgcgtccgtattcggcacctggagatgcactttgtgaaggaggccagcggtattggtggtgagattatccaccagcctaccacccagactgggaccgtttacatccttctgcagggttccactatcttccatgaccgcagaagagaccaggtgttgccttttcaggccgctgctccgctcaactaccattacgcgtaccgcctcgacaccggcgactccactctcacaaacgaaccctctgaacagtttgccaacaagttcatgcagatgacacccttcacccgttggaggcttcgtctgtctgcgtccgcaaaagagaatgcaggattagcctttcccacggctacagcacttgactccactacccagattgtcatcactttccatgttacggccatcagacaaattgactggcggcacgacgaagag

SEQ ID NO: 392 - DNA, 2601 bp, synthetic construct
  misc_feature 1..2601: note = PtIP-83 polypeptide variant encoding polynucleotide
  source 1..2601: mol_type = other DNA
atagctctcgtggattacggcaagcttttcgaggatctgaaccagataagcatgggtgtactggatcgggtagagttttcagaggtgatggtgatccacaggatgtatgtgaggctagctgatctgaatgtggggcagctcgagggagccgagaaagtgaggcagttgtatgttttttgcgacgttctcgtgctaccagtcgtggaatggcggtggccgccgcaaataccaggatcggtgacggtgatcatattgtgtcgtcttcttcaatggccaactgatgggaggcagtcggacaccgagctccacctgacattcatgaagttgcatgccatacaacgagaggaaaatcggtgggagataaccgcagcagatggcatgaactggggagtttacatacacgcagaggaagtacaggttggcgtgctgacaatgtcatggtcttcggtacttagagtttcggcacttcgctctgttataacctccggctttcgcgccgttagtgtgtttgaggtaccgggaagtgtaaggtccacccttggagctactttaaggcccgatcacgccttatatagtacaactatgcaagccacacccaacgcatcgcatattagtgcttttaaccttcgcatagtttccccgtcggcatatcgtgtttgtcctctccaaaatgacacagatacctacttaggtattccagcagacgtggcggcagttcttccagtagacgtggtgactgatcctaacatcttgctgggcatgcagacaacggtacacattgcggagctagtcaaggcatgtcatccgtcacccgatgttgtgagcgctgtaggggagcacctgaactggctcaacaaactcttactcccacttaaggaatcgactcagttgcaaggaagcgagtcgtacaaggagtgccttgcactcttgggtcgtgttcacgctgcgatgaagatggtgagaattggcttagtagtgccccagctgcaatacagaatgtacggtagcctcatcaaccaaatggcccaagtagcacaaaactacgaccgagaattcaagcaattcaaattattcatcatccaaaatcaaatccttggcagctatttgctgcagcagaacagggcatttgctgagagggagctgcagatggagagctttcatgctgctgtcatttctcaaagaagggaggagttggacaatacattcgcaaagatggaccgattgagcgggcaaatggaggcagagagtagtgcaatggagcaagccaaaaaggaaatggacgaaggattgaggcagttccagaataggcaagttgcgaacgccctctttgccgttcttagcgctgtagctcagattgggcttgcattccttacggctggtgcaacggctcctggagctgtggcgtcggcggggcaagctgtgagcatagcaggtcaggcggcgcaaggtctgcgaagggtggtggaaattctagagcagctggaggctgtgatggaggttgtggctgctgtgaaggacctcgtggattcattggaacaggtaggtcagattgtggacgcaccggtgatgccggaattgccctcagaggcggactggtccatttttgtgaacgaggtggaggccgtggcagagggcatgccaacggaagtctcggaggttccggtgtggaggggcaagtgcaagagcgtggctgcactgggtcgggagatgagcatcacggcagtacagatgtcggagctgcagtatgacatctgggtgcaaggcatgatgcgggatatggctcgaagccaggcagacaggctggccgcaattcaacccgcggaccttaccaactatttggagatggctacccagatggatatgcggactacgaggatgctgctggggctcctcaacatattgcgcatccagaatgcggcgctcaggtacgagtatcttctaatgcccacggagctcacaacatggccactgggtatggataccgtgggtgacttgctcatcgcgcaggagaatgctgcactgataggattaatgcagctagggccctcatctgatttcacgagcaggcatgtggtgaaagacatacctgtgaacttgctgctcgatggcgaggattgggagtttgagattcctgtgcaagctggcatgtccagcttcccttccagctggtctcgcgtccgtattcggcacctggagatgcactttgtgaaggaggccagcggtattggtggtgagattatccaccagcctaccacccagactgggaccgtttacatccttctgcagggttccactatcttccatgaccgcagaagagaccaggtgttgccttttcaggccgctgctccgctcaactaccattacgcgtaccgcctcgacaccggcgactccactctcacaaacgaaccctctgaacagtttgccaacaagttcatgcagatgacacccttcacccgttggaggcttcgtctgtctgcgtccgcaaaagagaatgcaggattagcctttcccacggctacagcacttgactccactacccagattgtcatcactttccatgttacggccatcagacaaattgactggcggcacgacgaagag

SEQ ID NO: 393 - DNA, 2601 bp, synthetic construct
  misc_feature 1..2601: note = PtIP-83 polypeptide variant encoding polynucleotide
  source 1..2601: mol_type = other DNA
atggctctcgtggattacggcaagcttttcgaggatctgaaccagataagcatgggtgtactggatcgggtagagttttcagaggtgatggtgatccacaggatgtatgtgaggctagctgatctgaatgtggggcagctcgagggagccgagaaagtgaggcggttgtatatttttgccgacattctcgagctaccagtcgtggaatggcggtggccgccgcaaataccaggatcggtgacggtgatcatattgtgtcgtcttcttcaatggccaactgatgggaggcagtcggacaccgagctccacctgacattcatgaagttgcatgccatacaacgagaggaaaatcggtgggagataaccgcagcagatggcatgaactggggagtttacatacacgcagaggaagtacaggttggcgtgctgacaatgtcatggtcttcggtacttagagtttcggcacttcgctctgttataacctccggctttcgcgccgttagtgtgtttgaggtaccgggaagtgtaaggtccacccttggagctactttaaggcccgatcacgccttatatagtacaactatgcaagccacacccaacgcatcgcatattagtgcttttaaccttcgcatagtttccccgtcggcatatcgtgtttgtcctctccaaaatgacacagatacctacttaggtattccagcagacgtggcggcagttcttccagtagacgtggtgactgatcctaacatcttgctgggcatgcagacaacggtacacattgcggagctagtcaaggcatgtcatccgtcacccgatgttgtgagcgctgtaggggagcacctgaactggctcaacaaactcttactcccacttaaggaatcgactcagttgcaaggaagcgagtcgtacaaggagtgccttgcactcttgggtcgtgttcacgctgcgatgaagatggtgagaattggcttagtagtgccccagctgcaatacagaatgtacggtagcctcatcaaccaaatggcccaagtagcacaaaactacgaccgagaattcaagcaattcaaattattcatcatccaaaatcaaatccttggcagctatttgctgcagcagaacagggcatttgctgagagggagctgcagatggagagctttcatgctgctgtcatttctcaaagaagggaggagttggacaatacattcgcaaagatggaccgattgagcgggcaaatggaggcagagagtagtgcaatggagcaagccaaaaaggaaatggacgaaggattgaggcagttccagaataggcaagttgcgaacgccctctttgccgttcttagcgctgtagctcagattgggcttgcattccttacggctggtgcaacggctcctggagctgtggcgtcggcggggcaagctgtgagcatagcaggtcaggcggcgcaaggtctgcgaagggtggtggaaattctagagcagctggaggctgtgatggaggttgtggctgctgtgaaggacctcgtggattcattggaacaggtaggtcagattgtggacgcaccggtgatgccggaattgccctcagaggcggactggtccatttttgtgaacgaggtggaggccgtggcagagggcatgccaacggaagtctcggaggttccggtgtggatggtcaagtgcaagaatgtggctgcactgggtcgggagatgagcatcacggcagtacagatgtcggagctgcagtatgacatctgggtgcaaggcatgatgcgggatatggctcgaagccaggcagacaggctggccgcaattcaacccgcggaccttaccaactatttggagatggctacccagatggatatgcggactacgaggatgctgctggggctcctcaacatattgcgcatccagaatgcggcgctcaggtacgagtatcttctaatgcccacggagctcacaacatggccactgggtatggataccgtgggtgacttgctcatcgcgcaggagaatgctgcactgataggattaatgcagctagggccctcatctgatttcacgagcaggcatgtggtgaaagacatacctgtgaacttgctgctcgatggcgaggattgggagtttgagattcctgtgcaagctggcatgtccagcttcccttccagctggtctcgcgtccgtattcggcacctggagatgcactttgtgaaggaggccagcggtattggtggtgagattatccaccagcctaccacccagactgggaccgtttacatccttctgcagggttccactatcttccatgaccgcagaagagaccaggtgttgccttttcaggccgctgctccgctcaactaccattacgcgtaccgcctcgacaccggcgactccactctcacaaacgaaccctctgaacagtttgccaacaagttcatgcagatgacacccttcacccgttggaggcttcgtctgtctgcgtccgcaaaagagaatgcaggattagcctttcccacggctacagcacttgactccactacccagattgtcatcactttccatgttacggccatcagacaaattgactggcggcacgacgaagag

SEQ ID NO: 394 - DNA, 2601 bp, synthetic construct
  misc_feature 1..2601: note = PtIP-83 polypeptide variant encoding polynucleotide
  source 1..2601: mol_type = other DNA
atggctctcgtggattacggcaagcttttcgaggatctgaaccagataagcatgggtgtactggatcgggtagagttttcagaggtgatggtgatccacaggatgtatgtgaggctagctgatctgaatgtggggcagctcgagggagccgagaaagtgaggcgcttgtatgttttttgcgacgttgtcgtgctaccagtcgtggaatggcggtggccgccgcaaataccaggatcggtgacggtgatcatattgtgtcgtcttcttcaatggccaactgatgggaggcagtcggacaccgagctccacctgacattcatgaagttgcatgccatacaacgagaggaaaatcggtgggagataaccgcagcagatggcatgaactggggagtttacatacacgcagaggaagtacaggttggcgtgctgacaatgtcatggtcttcggtacttagagtttcggcacttcgctctgttataacctccggctttcgcgccgttagtgtgtttgaggtaccgggaagtgtaaggtccacccttggagctactttaaggcccgatcacgccttatatagtacaactatgcaagccacacccaacgcatcgcatattagtgcttttaaccttcgcatagtttccccgtcggcatatcgtgtttgtcctctccaaaatgacacagatacctacttaggtattccagcagacgtggcggcagttcttccagtagacgtggtgactgatcctaacatcttgctgggcatgcagacaacggtacacattgcggagctagtcaaggcatgtcatccgtcacccgatgttgtgagcgctgtaggggagcacctgaactggctcaacaaactcttactcccacttaaggaatcgactcagttgcaaggaagcgagtcgtacaaggagtgccttgcactcttgggtcgtgttcacgctgcgatgaagatggtgagaattggcttagtagtgccccagctgcaatacagaatgtacggtagcctcatcaaccaaatggcccaagtagcacaaaactacgaccgagaattcaagcaattcaaattattcatcatccaaaatcaaatccttggcagctatttgctgcagcagaacagggcatttgctgagagggagctgcagatggagagctttcatgctgctgtcatttctcaaagaagggaggagttggacaatacattcgcaaagatggaccgattgagcgggcaaatggaggcagagagtagtgcaatggagcaagccaaaaaggaaatggacgaaggattgaggcagttccagaataggcaagttgcgaacgccctctttgccgttcttagcgctgtagctcagattgggcttgcattccttacggctggtgcaacggctcctggagctgtggcgtcggcggggcaagctgtgagcatagcaggtcaggcggcgcaaggtctgcgaagggtggtggaaattctagagcagctggaggctgtgatggaggttgtggctgctgtgaaggacctcgtggattcattggaacaggtaggtcagattgtggacgcaccggtgatgccggaattgccctcagaggcggactggtccatttttgtgaacgaggtggaggccgtggcagagggcatgccaacggaagtctcggaggttccggtgtggagggccaggtgcaagaatgtggctgcactgggtcgggagatgagcatcacggcagtacagatgtcggagctgcagtatgacatctgggtgcaaggcatgatgcgggatatggctcgaagccaggcagacaggctggccgcaattcaacccgcggaccttaccaactatttggagatggctacccagatggatatgcggactacgaggatgctgctggggctcctcaacatattgcgcatccagaatgcggcgctcaggtacgagtatcttctaatgcccacggagctcacaacatggccactgggtatggataccgtgggtgacttgctcatcgcgcaggagaatgctgcactgataggattaatgcagctagggccctcatctgatttcacgagcaggcatgtggtgaaagacatacctgtgaacttgctgctcgatggcgaggattgggagtttgagattcctgtgcaagctggcatgtccagcttcccttccagctggtctcgcgtccgtattcggcacctggagatgcactttgtgaaggaggccagcggtattggtggtgagattatccaccagcctaccacccagactgggaccgtttacatccttctgcagggttccactatcttccatgaccgcagaagagaccaggtgttgccttttcaggccgctgctccgctcaactaccattacgcgtaccgcctcgacaccggcgactccactctcacaaacgaaccctctgaacagtttgccaacaagttcatgcagatgacacccttcacccgttggaggcttcgtctgtctgcgtccgcaaaagagaatgcaggattagcctttcccacggctacagcacttgactccactacccagattgtcatcactttccatgttacggccatcagacaaattgactggcggcacgacgaagag

SEQ ID NO: 395 - DNA, 2601 bp, synthetic construct
  misc_feature 1..2601: note = PtIP-83 polypeptide variant encoding polynucleotide
  source 1..2601: mol_type = other DNA
atggctctcgtggattacggcaagcttttcgaggatctgaaccagataagcatgggtgtactggatcgggtagagttttcagaggtgatggtgatccacaggatgtatgtgaggctagctgatctgaatgtggggcagctcgagggagccgagaaagtgaggcggttgtatgtttttaccgacgttctcgtgctaccagtcgtggaatggcggtggccgccgcaaataccaggatcggtgacggtgatcatattgtgtcgtcttcttcaatggccaactgatgggaggcagtcggacaccgagctccacctgacattcatgaagttgcatgccatacaacgagaggaaaatcggtgggagataaccgcagcagatggcatgaactggggagtttacatacacgcagaggaagtacaggttggcgtgctgacaatgtcatggtcttcggtacttagagtttcggcacttcgctctgttataacctccggctttcgcgccgttagtgtgtttgaggtaccgggaagtgtaaggtccacccttggagctactttaaggcccgatcacgccttatatagtacaactatgcaagccacacccaacgcatcgcatattagtgcttttaaccttcgcatagtttccccgtcggcatatcgtgtttgtcctctccaaaatgacacagatacctacttaggtattccagcagacgtggcggcagttcttccagtagacgtggtgactgatcctaacatcttgctgggcatgcagacaacggtacacattgcggagctagtcaaggcatgtcatccgtcacccgatgttgtgagcgctgtaggggagcacctgaactggctcaacaaactcttactcccacttaaggaatcgactcagttgcaaggaagcgagtcgtacaaggagtgccttgcactcttgggtcgtgttcacgctgcgatgaagatggtgagaattggcttagtagtgccccagctgcaatacagaatgtacggtagcctcatcaaccaaatggcccaagtagcacaaaactacgaccgagaattcaagcaattcaaattattcatcatccaaaatcaaatccttggcagctatttgctgcagcagaacagggcatttgctgagagggagctgcagatggagagctttcatgctgctgtcatttctcaaagaagggaggagttggacaatacattcgcaaagatggaccgattgagcgggcaaatggaggcagagagtagtgcaatggagcaagccaaaaaggaaatggacgaaggattgaggcagttccagaataggcaagttgcgaacgccctctttgccgttcttagcgctgtagctcagattgggcttgcattccttacggctggtgcaacggctcctggagctgtggcgtcggcggggcaagctgtgagcatagcaggtcaggcggcgcaaggtctgcgaagggtggtggaaattctagagcagctggaggctgtgatggaggttgtggctgctgtgaaggacctcgtggattcattggaacaggtaggtcagattgtggacgcaccggtgatgccggaattgccctcagaggcggactggtccatttttgtgaacgaggtggaggccgtggcagagggcatgccaacggaagtctcggaggttccggtgtggatcggcaagtgcaagaatgtggctgcactgggtcgggagatgagcatcacggcagtacagatgtcggagctgcagtatgacatctgggtgcaaggcatgatgcgggatatggctcgaagccaggcagacaggctggccgcaattcaacccgcggaccttaccaactatttggagatggctacccagatggatatgcggactacgaggatgctgctggggctcctcaacatattgcgcatccagaatgcggcgctcaggtacgagtatcttctaatgcccacggagctcacaacatggccactgggtatggataccgtgggtgacttgctcatcgcgcaggagaatgctgcactgataggattaatgcagctagggccctcatctgatttcacgagcaggcatgtggtgaaagacatacctgtgaacttgctgctcgatggcgaggattgggagtttgagattcctgtgcaagctggcatgtccagcttcccttccagctggtctcgcgtccgtattcggcacctggagatgcactttgtgaaggaggccagcggtattggtggtgagattatccaccagcctaccacccagactgggaccgtttacatccttctgcagggttccactatcttccatgaccgcagaagagaccaggtgttgccttttcaggccgctgctccgctcaactaccattacgcgtaccgcctcgacaccggcgactccactctcacaaacgaaccctctgaacagtttgccaacaagttcatgcagatgacacccttcacccgttggaggcttcgtctgtctgcgtccgcaaaagagaatgcaggattagcctttcccacggctacagcacttgactccactacccagattgtcatcactttccatgttacggccatcagacaaattgactggcggcacgacgaagag

SEQ ID NO: 396 - DNA, 2601 bp, synthetic construct
  misc_feature 1..2601: note = PtIP-83 polypeptide variant encoding polynucleotide
  source 1..2601: mol_type = other DNA
atggctctcgtggattacggcaagcttttcgaggatctgaaccagataagcatgggtgtactggatcgggtagagttttcagaggtgatggtgatccacaggatgtatgtgaggctagctgatctgaatgtggggcagctcgagggagccgagaaagtgaggcggttgtatgtttttaccgacgttctcgtgctaccagtcgtggaatggcggtggccgccgcaaataccaggatcggtgacggtgatcatattgtgtcgtcttcttcaatggccaactgatgggaggcagtcggacaccgagctccacctgacattcatgaagttgcatgccatacaacgagaggaaaatcggtgggagataaccgcagcagatggcatgaactggggagtttacatacacgcagaggaagtacaggttggcgtgctgacaatgtcatggtcttcggtacttagagtttcggcacttcgctctgttataacctccggctttcgcgccgttagtgtgtttgaggtaccgggaagtgtaaggtccacccttggagctactttaaggcccgatcacgccttatatagtacaactatgcaagccacacccaacgcatcgcatattagtgcttttaaccttcgcatagtttccccgtcggcatatcgtgtttgtcctctccaaaatgacacagatacctacttaggtattccagcagacgtggcggcagttcttccagtagacgtggtgactgatcctaacatcttgctgggcatgcagacaacggtacacattgcggagctagtcaaggcatgtcatccgtcacccgatgttgtgagcgctgtaggggagcacctgaactggctcaacaaactcttactcccacttaaggaatcgactcagttgcaaggaagcgagtcgtacaaggagtgccttgcactcttgggtcgtgttcacgctgcgatgaagatggtgagaattggcttagtagtgccccagctgcaatacagaatgtacggtagcctcatcaaccaaatggcccaagtagcacaaaactacgaccgagaattcaagcaattcaaattattcatcatccaaaatcaaatccttggcagctatttgctgcagcagaacagggcatttgctgagagggagctgcagatggagagctttcatgctgctgtcatttctcaaagaagggaggagttggacaatacattcgcaaagatggaccgattgagcgggcaaatggaggcagagagtagtgcaatggagcaagccaaaaaggaaatggacgaaggattgaggcagttccagaataggcaagttgcgaacgccctctttgccgttcttagcgctgtagctcagattgggcttgcattccttacggctggtgcaacggctcctggagctgtggcgtcggcggggcaagctgtgagcatagcaggtcaggcggcgcaaggtctgcgaagggtggtggaaattctagagcagctggaggctgtgatggaggttgtggctgctgtgaaggacctcgtggattcattggaacaggtaggtcagattgtggacgcaccggtgatgccggaattgccctcagaggcggactggtccatttttgtgaacgaggtggaggccgtggcagagggcatgccaacggaagtctcggaggttccggtgtggagggccaggtgcaagaatgtggctgcactgggtcgggagatgagcatcacggcagtacagatgtcggagctgcagtatgacatctgggtgcaaggcatgatgcgggatatggctcgaagccaggcagacaggctggccgcaattcaacccgcggaccttaccaactatttggagatggctacccagatggatatgcggactacgaggatgctgctggggctcctcaacatattgcgcatccagaatgcggcgctcaggtacgagtatcttctaatgcccacggagctcacaacatggccactgggtatggataccgtgggtgacttgctcatcgcgcaggagaatgctgcactgataggattaatgcagctagggccctcatctgatttcacgagcaggcatgtggtgaaagacatacctgtgaacttgctgctcgatggcgaggattgggagtttgagattcctgtgcaagctggcatgtccagcttcccttccagctggtctcgcgtccgtattcggcacctggagatgcactttgtgaaggaggccagcggtattggtggtgagattatccaccagcctaccacccagactgggaccgtttacatccttctgcagggttccactatcttccatgaccgcagaagagaccaggtgttgccttttcaggccgctgctccgctcaactaccattacgcgtaccgcctcgacaccggcgactccactctcacaaacgaaccctctgaacagtttgccaacaagttcatgcagatgacacccttcacccgttggaggcttcgtctgtctgcgtccgcaaaagagaatgcaggattagcctttcccacggctacagcacttgactccactacccagattgtcatcactttccatgttacggccatcagacaaattgactggcggcacgacgaagag

SEQ ID NO: 397 - DNA, 2601 bp, synthetic construct
  misc_feature 1..2601: note = PtIP-83 polypeptide variant encoding polynucleotide
  source 1..2601: mol_type = other DNA
atggctctcgtggattacggcaagcttttcgaggatctgaaccagataagcatgggtgtactggatcgggtagagttttcagaggtgatggtgatccacaggatgtatgtgaggctagctgatctgaatgtggggcagctcgagggagccgagaaagtgaggcggttgtatgtttttaccgacgttctcgtgctaccagtcgtggaatggcggtggccgccgcaaataccaggatcggtgacggtgatcatattgtgtcgtcttcttcaatggccaactgatgggaggcagtcggacaccgagctccacctgacattcatgaagttgcatgccatacaacgagaggaaaatcggtgggagataaccgcagcagatggcatgaactggggagtttacatacacgcagaggaagtacaggttggcgtgctgacaatgtcatggtcttcggtacttagagtttcggcacttcgctctgttataacctccggctttcgcgccgttagtgtgtttgaggtaccgggaagtgtaaggtccacccttggagctactttaaggcccgatcacgccttatatagtacaactatgcaagccacacccaacgcatcgcatattagtgcttttaaccttcgcatagtttccccgtcggcatatcgtgtttgtcctctccaaaatgacacagatacctacttaggtattccagcagacgtggcggcagttcttccagtagacgtggtgactgatcctaacatcttgctgggcatgcagacaacggtacacattgcggagctagtcaaggcatgtcatccgtcacccgatgttgtgagcgctgtaggggagcacctgaactggctcaacaaactcttactcccacttaaggaatcgactcagttgcaaggaagcgagtcgtacaaggagtgccttgcactcttgggtcgtgttcacgctgcgatgaagatggtgagaattggcttagtagtgccccagctgcaatacagaatgtacggtagcctcatcaaccaaatggcccaagtagcacaaaactacgaccgagaattcaagcaattcaaattattcatcatccaaaatcaaatccttggcagctatttgctgcagcagaacagggcatttgctgagagggagctgcagatggagagctttcatgctgctgtcatttctcaaagaagggaggagttggacaatacattcgcaaagatggaccgattgagcgggcaaatggaggcagagagtagtgcaatggagcaagccaaaaaggaaatggacgaaggattgaggcagttccagaataggcaagttgcgaacgccctctttgccgttcttagcgctgtagctcagattgggcttgcattccttacggctggtgcaacggctcctggagctgtggcgtcggcggggcaagctgtgagcatagcaggtcaggcggcgcaaggtctgcgaagggtggtggaaattctagagcagctggaggctgtgatggaggttgtggctgctgtgaaggacctcgtggattcattggaacaggtaggtcagattgtggacgcaccggtgatgccggaattgccctcagaggcggactggtccatttttgtgaacgaggtggaggccgtggcagagggcatgccaacggaagtctcggaggttccggtgtggacggtcaagtgcaagaatgtggctgcactgggtcgggagatgagcatcacggcagtacagatgtcggagctgcagtatgacatctgggtgcaaggcatgatgcgggatatggctcgaagccaggcagacaggctggccgcaattcaacccgcggaccttaccaactatttggagatggctacccagatggatatgcggactacgaggatgctgctggggctcctcaacatattgcgcatccagaatgcggcgctcaggtacgagtatcttctaatgcccacggagctcacaacatggccactgggtatggataccgtgggtgacttgctcatcgcgcaggagaatgctgcactgataggattaatgcagctagggccctcatctgatttcacgagcaggcatgtggtgaaagacatacctgtgaacttgctgctcgatggcgaggattgggagtttgagattcctgtgcaagctggcatgtccagcttcccttccagctggtctcgcgtccgtattcggcacctggagatgcactttgtgaaggaggccagcggtattggtggtgagattatccaccagcctaccacccagactgggaccgtttacatccttctgcagggttccactatcttccatgaccgcagaagagaccaggtgttgccttttcaggccgctgctccgctcaactaccattacgcgtaccgcctcgacaccggcgactccactctcacaaacgaaccctctgaacagtttgccaacaagttcatgcagatgacacccttcacccgttggaggcttcgtctgtctgcgtccgcaaaagagaatgcaggattagcctttcccacggctacagcacttgactccactacccagattgtcatcactttccatgttacggccatcagacaaattgactggcggcacgacgaagag

SEQ ID NO: 398 - protein, 867 aa, synthetic construct
  REGION 1..867: note = PtIP-83 polypeptide variant
MALVDYGKLFEDLNQISMGVLDRVEFSEVMVIHRMYVRLADLNVGQLEGAEKVKHLYIFTDVLELPVVEWRWPPQIPGSVTVIILCRLLQWPTDGRQSDTELHLTFMKLHAIQREENRWEITAADGMNWGVYIHAEEVQVGVLTMSWSSVLRVSALRSVITSGFRAVSVFEVPGSVRSTLGATLRPDHALYSTTMQATPNASHISAFNLRIVSPSAYRVCPLQNDTDTYLGIPADVAAVLPVDVVTDPNILLGMQTTVHIAELVKACHPSPDVVSAVGEHLNWLNKLLLPLKESTQLQGSESYKECLALLGRVHAAMKMVRIGLVVPQLQYRMYGSLINQMAQVAQNYDREFKQFKLFIIQNQILGSYLLQQNRAFAERELQMESFHAAVISQRREELDNTFAKMDRLSGQMEAESSAMEQAKKEMDEGLRQFQNRQVANALFAVLSAVAQIGLAFLTAGATAPGAVASAGQAVSIAGQAAQGLRRVVEILEQLEAVMEVVAAVKDLVDSLEQVGQIVDAPVMPELPSEADWFIFVNEVEAVAEGMPTEVSEVPVWHGKCKNVAALGREMSITAVQMSELQYDIWVQGMMRDMARSQADRLAAIQPADLTNYLEMATQMDMRTTRMLLGLLNILRIQNAALRYEYLLMPTELTTWPLGMDTVGDLLIAQENAALIGLMQLGPSSDFTSRHVVKDIPVNLLLDGEDWEFEIPVQAGMSSFPSSWSRVRIRHLEMHFVKEASGIGGEIIHQPTTQTGTVYILLQGSTIFHDRRRDQVLPFQAAAPLNYHYAYRLDTGDSTLTNEPSEQFANKFMQMTPFTRWRLRLSASAKENAGLAFPTATALDSTTQIVITFHVTAIRQIDWRHDEE

SEQ ID NO: 399 - protein, 867 aa, synthetic construct
  REGION 1..867: note = PtIP-83 polypeptide variant
MALVDYGKLFEDLNQISMGVLDRVEFSEVMVIHRMYVRLADLNVGQLEGAEKVKHLYIFTDVLELPVVEWRWPPQIPGSVTVIILCRLLQWPTDGRQSDTELHLTFMKLHAIQREENRWEITAADGMNWGVYIHAEEVQVGVLTMSWSSVLRVSALRSVITSGFRAVSVFEVPGSVRSTLGATLRPDHALYSTTMQATPNASHISAFNLRIVSPSAYRVCPLQNDTDTYLGIPADVAAVLPVDVVTDPNILLGMQTTVHIAELVKACHPSPDVVSAVGEHLNWLNKLLLPLKESTQLQGSESYKECLALLGRVHAAMKMVRIGLVVPQLQYRMYGSLINQMAQVAQNYDREFKQFKLFIIQNQILGSYLLQQNRAFAERELQMESFHAAVISQRREELDNTFAKMDRLSGQMEAESSAMEQAKKEMDEGLRQFQNRQVANALFAVLSAVAQIGLAFLTAGATAPGAVASAGQAVSIAGQAAQGLRRVVEILEQLEAVMEVVAAVKDLVDSLEQVGQIVDAPVMPELPSEADWSIFVNEVEAVAEGMPTEVSEVPVWLARCKNVAALGREMSITAVQMSELQYDIWVQGMMRDMARSQADRLAAIQPADLTNYLEMATQMDMRTTRMLLGLLNILRIQNAALRYEYLLMPTELTTWPLGMDTVGDLLIAQENAALIGLMQLGPSSDFTSRHVVKDIPVNLLLDGEDWEFEIPVQAGMSSFPSSWSRVRIRHLEMHFVKEASGIGGEIIHQPTTQTGTVYILLQGSTIFHDRRRDQVLPFQAAAPLNYHYAYRLDTGDSTLTNEPSEQFANKFMQMTPFTRWRLRLSASAKENAGLAFPTATALDSTTQIVITFHVTAIRQIDWRHDEE

SEQ ID NO: 400 - protein, 867 aa, synthetic construct
  REGION 1..867: note = PtIP-83 polypeptide variant
MALVDYGKLFEDLNQISMGVLDRVEFSEVMVIHRMYVRLADLNVGQLEGAEKVKHLYIFTDVLELPVVEWRWPPQIPGSVTVIILCRLLQWPTDGRQSDTELHLTFMKLHAIQREENRWEITAADGMNWGVYIHAEEVQVGVLTMSWSSVLRVSALRSVITSGFRAVSVFEVPGSVRSTLGATLRPDHALYSTTMQATPNASHISAFNLRIVSPSAYRVCPLQNDTDTYLGIPADVAAVLPVDVVTDPNILLGMQTTVHIAELVKACHPSPDVVSAVGEHLNWLNKLLLPLKESTQLQGSESYKECLALLGRVHAAMKMVRIGLVVPQLQYRMYGSLINQMAQVAQNYDREFKQFKLFIIQNQILGSYLLQQNRAFAERELQMESFHAAVISQRREELDNTFAKMDRLSGQMEAESSAMEQAKKEMDEGLRQFQNRQVANALFAVLSAVAQIGLAFLTAGATAPGAVASAGQAVSIAGQAAQGLRRVVEILEQLEAVMEVVAAVKDLVDSLEQVGQIVDAPVMPELPSEADWSIFVNEVEAVAEGMPTEVSEVPVWQARCKHVAALGREMSITAVQMSELQYDIWVQGMMRDMARSQADRLAAIQPADLTNYLEMATQMDMRTTRMLLGLLNILRIQNAALRYEYLLMPTELTTWPLGMDTVGDLLIAQENAALIGLMQLGPSSDFTSRHVVKDIPVNLLLDGEDWEFEIPVQAGMSSFPSSWSRVRIRHLEMHFVKEASGIGGEIIHQPTTQTGTVYILLQGSTIFHDRRRDQVLPFQAAAPLNYHYAYRLDTGDSTLTNEPSEQFANKFMQMTPFTRWRLRLSASAKENAGLAFPTATALDSTTQIVITFHVTAIRQIDWRHDEE

SEQ ID NO: 401 - protein, 867 aa, synthetic construct
  REGION 1..867: note = PtIP-83 polypeptide variant
MALVDYGKLFEDLNQISMGVLDRVEFSEVMVIHRMYVRLADLNVGQLEGAEKVKHLYVFADVIELPVVEWRWPPQIPGSVTVIILCRLLQWPTDGRQSDTELHLTFMKLHAIQREENRWEITAADGMNWGVYIHAEEVQVGVLTMSWSSVLRVSALRSVITSGFRAVSVFEVPGSVRSTLGATLRPDHALYSTTMQATPNASHISAFNLRIVSPSAYRVCPLQNDTDTYLGIPADVAAVLPVDVVTDPNILLGMQTTVHIAELVKACHPSPDVVSAVGEHLNWLNKLLLPLKESTQLQGSESYKECLALLGRVHAAMKMVRIGLVVPQLQYRMYGSLINQMAQVAQNYDREFKQFKLFIIQNQILGSYLLQQNRAFAERELQMESFHAAVISQRREELDNTFAKMDRLSGQMEAESSAMEQAKKEMDEGLRQFQNRQVANALFAVLSAVAQIGLAFLTAGATAPGAVASAGQAVSIAGQAAQGLRRVVEILEQLEAVMEVVAAVKDLVDSLEQVGQIVDAPVMPELPSEADWSIFVNEVEAVAEGMPTEVSEVPVWQARCKHVAALGREMSITAVQMSELQYDIWVQGMMRDMARSQADRLAAIQPADLTNYLEMATQMDMRTTRMLLGLLNILRIQNAALRYEYLLMPTELTTWPLGMDTVGDLLIAQENAALIGLMQLGPSSDFTSRHVVKDIPVNLLLDGEDWEFEIPVQAGMSSFPSSWSRVRIRHLEMHFVKEASGIGGEIIHQPTTQTGTVYILLQGSTIFHDRRRDQVLPFQAAAPLNYHYAYRLDTGDSTLTNEPSEQFANKFMQMTPFTRWRLRLSASAKENAGLAFPTATALDSTTQIVITFHVTAIRQIDWRHDEE

SEQ ID NO: 402 - protein, 867 aa, synthetic construct
  REGION 1..867: note = PtIP-83 polypeptide variant
MALVDYGKLFEDLNQISMGVLDRVEFSEVMVIHRMYVRLADLNVGQLEGAEKVKHLYVFADVIELPVVEWRWPPQIPGSVTVIILCRLLQWPTDGRQSDTELHLTFMKLHAIQREENRWEITAADGMNWGVYIHAEEVQVGVLTMSWSSVLRVSALRSVITSGFRAVSVFEVPGSVRSTLGATLRPDHALYSTTMQATPNASHISAFNLRIVSPSAYRVCPLQNDTDTYLGIPADVAAVLPVDVVTDPNILLGMQTTVHIAELVKACHPSPDVVSAVGEHLNWLNKLLLPLKESTQLQGSESYKECLALLGRVHAAMKMVRIGLVVPQLQYRMYGSLINQMAQVAQNYDREFKQFKLFIIQNQILGSYLLQQNRAFAERELQMESFHAAVISQRREELDNTFAKMDRLSGQMEAESSAMEQAKKEMDEGLRQFQNRQVANALFAVLSAVAQIGLAFLTAGATAPGAVASAGQAVSIAGQAAQGLRRVVEILEQLEAVMEVVAAVKDLVDSLEQVGQIVDAPVMPELPSEADWSIFVNEVEAVAEGMPTEVSEVPVWRARCKNVAALGREMSITAVQMSELQYDIWVQGMMRDMARSQADRLAAIQPADLTNYLEMATQMDMRTTRMLLGLLNILRIQNAALRYEYLLMPTELTTWPLGMDTVGDLLIAQENAALIGLMQLGPSSDFTSRHVVKDIPVNLLLDGEDWEFEIPVQAGMSSFPSSWSRVRIRHLEMHFVKEASGIGGEIIHQPTTQTGTVYILLQGSTIFHDRRRDQVLPFQAAAPLNYHYAYRLDTGDSTLTNEPSEQFANKFMQMTPFTRWRLRLSASAKENAGLAFPTATALDSTTQIVITFHVTAIRQIDWRHDEE

SEQ ID NO: 403 - protein, 867 aa, synthetic construct
  REGION 1..867: note = PtIP-83 polypeptide variant
MALVDYGKLFEDLNQISMGVLDRVEFSEVMVIHRMYVRLADLNVGQLEGAEKVKQLYIFCDVLELPVVEWRWPPQIPGSVTVIILCRLLQWPTDGRQSDTELHLTFMKLHAIQREENRWEITAADGMNWGVYIHAEEVQVGVLTMSWSSVLRVSALRSVITSGFRAVSVFEVPGSVRSTLGATLRPDHALYSTTMQATPNASHISAFNLRIVSPSAYRVCPLQNDTDTYLGIPADVAAVLPVDVVTDPNILLGMQTTVHIAELVKACHPSPDVVSAVGEHLNWLNKLLLPLKESTQLQGSESYKECLALLGRVHAAMKMVRIGLVVPQLQYRMYGSLINQMAQVAQNYDREFKQFKLFIIQNQILGSYLLQQNRAFAERELQMESFHAAVISQRREELDNTFAKMDRLSGQMEAESSAMEQAKKEMDEGLRQFQNRQVANALFAVLSAVAQIGLAFLTAGATAPGAVASAGQAVSIAGQAAQGLRRVVEILEQLEAVMEVVAAVKDLVDSLEQVGQIVDAPVMPELPSEADWSIFVNEVEAVAEGMPTEVSEVPVWQARCKNVAALGREMSITAVQMSELQYDIWVQGMMRDMARSQADRLAAIQPADLTNYLEMATQMDMRTTRMLLGLLNILRIQNAALRYEYLLMPTELTTWPLGMDTVGDLLIAQENAALIGLMQLGPSSDFTSRHVVKDIPVNLLLDGEDWEFEIPVQAGMSSFPSSWSRVRIRHLEMHFVKEASGIGGEIIHQPTTQTGTVYILLQGSTIFHDRRRDQVLPFQAAAPLNYHYAYRLDTGDSTLTNEPSEQFANKFMQMTPFTRWRLRLSASAKENAGLAFPTATALDSTTQIVITFHVTAIRQIDWRHDEE

SEQ ID NO: 404 - protein, 867 aa, synthetic construct
  REGION 1..867: note = PtIP-83 polypeptide variant
MALVDYGKLFEDLNQISMGVLDRVEFSEVMVIHRMYVRLADLNVGQLEGAEKVKRFYIFADIVELPVVEWRWPPQIPGSVTVIILCRLLQWPTDGRQSDTELHLTFMKLHAIQREENRWEITAADGMNWGVYIHAEEVQVGVLTMSWSSVLRVSALRSVITSGFRAVSVFEVPGSVRSTLGATLRPDHALYSTTMQATPNASHISAFNLRIVSPSAYRVCPLQNDTDTYLGIPADVAAVLPVDVVTDPNILLGMQTTVHIAELVKACHPSPDVVSAVGEHLNWLNKLLLPLKESTQLQGSESYKECLALLGRVHAAMKMVRIGLVVPQLQYRMYGSLINQMAQVAQNYDREFKQFKLFIIQNQILGSYLLQQNRAFAERELQMESFHAAVISQRREELDNTFAKMDRLSGQMEAESSAMEQAKKEMDEGLRQFQNRQVANALFAVLSAVAQIGLAFLTAGATAPGAVASAGQAVSIAGQAAQGLRRVVEILEQLEAVMEVVAAVKDLVDSLEQVGQIVDAPVMPELPSEADWSIFVNEVEAVAEGMPTEVSEVPVWIGKCKNVAALGREMSITAVQMSELQYDIWVQGMMRDMARSQADRLAAIQPADLTNYLEMATQMDMRTTRMLLGLLNILRIQNAALRYEYLLMPTELTTWPLGMDTVGDLLIAQENAALIGLMQLGPSSDFTSRHVVKDIPVNLLLDGEDWEFEIPVQAGMSSFPSSWSRVRIRHLEMHFVKEASGIGGEIIHQPTTQTGTVYILLQGSTIFHDRRRDQVLPFQAAAPLNYHYAYRLDTGDSTLTNEPSEQFANKFMQMTPFTRWRLRLSASAKENAGLAFPTATALDSTTQIVITFHVTAIRQIDWRHDEE

SEQ ID NO: 405 - protein, 867 aa, synthetic construct
  REGION 1..867: note = PtIP-83 polypeptide variant
MALVDYGKLFEDLNQISMGVLDRVEFSEVMVIHRMYVRLADLNVGQLEGAEKVKRFYIFADIVELPVVEWRWPPQIPGSVTVIILCRLLQWPTDGRQSDTELHLTFMKLHAIQREENRWEITAADGMNWGVYIHAEEVQVGVLTMSWSSVLRVSALRSVITSGFRAVSVFEVPGSVRSTLGATLRPDHALYSTTMQATPNASHISAFNLRIVSPSAYRVCPLQNDTDTYLGIPADVAAVLPVDVVTDPNILLGMQTTVHIAELVKACHPSPDVVSAVGEHLNWLNKLLLPLKESTQLQGSESYKECLALLGRVHAAMKMVRIGLVVPQLQYRMYGSLINQMAQVAQNYDREFKQFKLFIIQNQILGSYLLQQNRAFAERELQMESFHAAVISQRREELDNTFAKMDRLSGQMEAESSAMEQAKKEMDEGLRQFQNRQVANALFAVLSAVAQIGLAFLTAGATAPGAVASAGQAVSIAGQAAQGLRRVVEILEQLEAVMEVVAAVKDLVDSLEQVGQIVDAPVMPELPSEADWSIFVNEVEAVAEGMPTEVSEVPVWTVKCKNVAALGREMSITAVQMSELQYDIWVQGMMRDMARSQADRLAAIQPADLTNYLEMATQMDMRTTRMLLGLLNILRIQNAALRYEYLLMPTELTTWPLGMDTVGDLLIAQENAALIGLMQLGPSSDFTSRHVVKDIPVNLLLDGEDWEFEIPVQAGMSSFPSSWSRVRIRHLEMHFVKEASGIGGEIIHQPTTQTGTVYILLQGSTIFHDRRRDQVLPFQAAAPLNYHYAYRLDTGDSTLTNEPSEQFANKFMQMTPFTRWRLRLSASAKENAGLAFPTATALDSTTQIVITFHVTAIRQIDWRHDEE

SEQ ID NO: 406 - protein, 867 aa, synthetic construct
  REGION 1..867: note = PtIP-83 polypeptide variant
MALVDYGKLFEDLNQISMGVLDRVEFSEVMVIHRMYVRLADLNVGQLEGAEKVKRLYIFADIIELPVVEWRWPPQIPGSVTVIILCRLLQWPTDGRQSDTELHLTFMKLHAIQREENRWEITAADGMNWGVYIHAEEVQVGVLTMSWSSVLRVSALRSVITSGFRAVSVFEVPGSVRSTLGATLRPDHALYSTTMQATPNASHISAFNLRIVSPSAYRVCPLQNDTDTYLGIPADVAAVLPVDVVTDPNILLGMQTTVHIAELVKACHPSPDVVSAVGEHLNWLNKLLLPLKESTQLQGSESYKECLALLGRVHAAMKMVRIGLVVPQLQYRMYGSLINQMAQVAQNYDREFKQFKLFIIQNQILGSYLLQQNRAFAERELQMESFHAAVISQRREELDNTFAKMDRLSGQMEAESSAMEQAKKEMDEGLRQFQNRQVANALFAVLSAVAQIGLAFLTAGATAPGAVASAGQAVSIAGQAAQGLRRVVEILEQLEAVMEVVAAVKDLVDSLEQVGQIVDAPVMPELPSEADWSIFVNEVEAVAEGMPTEVSEVPVWMVKCKNVAALGREMSITAVQMSELQYDIWVQGMMRDMARSQADRLAAIQPADLTNYLEMATQMDMRTTRMLLGLLNILRIQNAALRYEYLLMPTELTTWPLGMDTVGDLLIAQENAALIGLMQLGPSSDFTSRHVVKDIPVNLLLDGEDWEFEIPVQAGMSSFPSSWSRVRIRHLEMHFVKEASGIGGEIIHQPTTQTGTVYILLQGSTIFHDRRRDQVLPFQAAAPLNYHYAYRLDTGDSTLTNEPSEQFANKFMQMTPFTRWRLRLSASAKENAGLAFPTATALDSTTQIVITFHVTAIRQIDWRHDEE

SEQ ID NO: 407 - protein, 867 aa, synthetic construct
  REGION 1..867: note = PtIP-83 polypeptide variant
MALVDYGKLFEDLNQISMGVLDRVEFSEVMVIHRMYVRLADLNVGQLEGAEKVKRLYIFADIIELPVVEWRWPPQIPGSVTVIILCRLLQWPTDGRQSDTELHLTFMKLHAIQREENRWEITAADGMNWGVYIHAEEVQVGVLTMSWSSVLRVSALRSVITSGFRAVSVFEVPGSVRSTLGATLRPDHALYSTTMQATPNASHISAFNLRIVSPSAYRVCPLQNDTDTYLGIPADVAAVLPVDVVTDPNILLGMQTTVHIAELVKACHPSPDVVSAVGEHLNWLNKLLLPLKESTQLQGSESYKECLALLGRVHAAMKMVRIGLVVPQLQYRMYGSLINQMAQVAQNYDREFKQFKLFIIQNQILGSYLLQQNRAFAERELQMESFHAAVISQRREELDNTFAKMDRLSGQMEAESSAMEQAKKEMDEGLRQFQNRQVANALFAVLSAVAQIGLAFLTAGATAPGAVASAGQAVSIAGQAAQGLRRVVEILEQLEAVMEVVAAVKDLVDSLEQVGQIVDAPVMPELPSEADWSIFVNEVEAVAEGMPTEVSEVPVWQARCKNVAALGREMSITAVQMSELQYDIWVQGMMRDMARSQADRLAAIQPADLTNYLEMATQMDMRTTRMLLGLLNILRIQNAALRYEYLLMPTELTTWPLGMDTVGDLLIAQENAALIGLMQLGPSSDFTSRHVVKDIPVNLLLDGEDWEFEIPVQAGMSSFPSSWSRVRIRHLEMHFVKEASGIGGEIIHQPTTQTGTVYILLQGSTIFHDRRRDQVLPFQAAAPLNYHYAYRLDTGDSTLTNEPSEQFANKFMQMTPFTRWRLRLSASAKENAGLAFPTATALDSTTQIVITFHVTAIRQIDWRHDEE

SEQ ID NO: 408 - protein, 867 aa, synthetic construct
  REGION 1..867: note = PtIP-83 polypeptide variant
MALVDYGKLFEDLNQISMGVLDRVEFSEVMVIHRMYVRLADLNVGQLEGAEEVKRLYIFADIIELPVVEWRWPPQIPGSVTVIILCRLLQWPTDGRQSDTELHLTFMKLHAIQREENRWEITAADGMNWGVYIHAEEVQVGVLTMSWSSVLRVSALRSVITSGFRAVSVFEVPGSVRSTLGATLRPDHALYSTTMQATPNASHISAFNLRIVSPSAYRVCPLQNDTDTYLGIPADVAAVLPVDVVTDPNILLGMQTTVHIAELVKACHPSPDVVSAVGEHLNWLNKLLLPLKESTQLQGSESYKECLALLGRVHAAMKMVRIGLVVPQLQYRMYGSLINQMAQVAQNYDREFKQFKLFIIQNQILGSYLLQQNRAFAERELQMESFHAAVISQRREELDNTFAKMDRLSGQMEAESSAMEQAKKEMDEGLRQFQNRQVANALFAVLSAVAQIGLAFLTAGATAPGAVASAGQAVSIAGQAAQGLRRVVEILEQLEAVMEVVAAVNDLVDSLEQVGQIVDAPVMPELPSEADWSIFVNEVEAVAEGMPTEVSEVPVWRGKCKSVAALGREMSITAVQMSELQYDIWVQGMMRDMARSQADRLAAIQPADLTNYLEMATQMDMRTTRMLLGLLNILRIQNAALRYEYLLMPTELTTWPLGMDTVGDLLIAQENAALIGLMQLGPSSDFTSRHVVKDIPVNLLLDGEDWEFEIPVQAGMSSFPSSWSRVRIRHLEMHFVKEASGIGGEIIHQPTTQTGTVYILLQGSTIFHDRRRDQVLPFQAAAPLNYHYAYRLDTGDSTLTNEPSEQFANKFMQMTPFTRWRLRLSASAKENAGLAFPTATALDSTTQIVITFHVTAIRQIDWRHDEE

SEQ ID NO: 409 - protein, 867 aa, synthetic construct
  REGION 1..867: note = PtIP-83 polypeptide variant
MALVDYGKLFEDLNQISMGVLDRVEFSEVMVIHRMYVRLADLNVGQLEGAEKVKRLYIFADIIELPVVEWRWPPQIPGSVTVIILCRLLQWPTDGRQSDTELHLTFMKLHAIQREENRWEITAADGMNWGVYIHAEEVQVGVLTMSWSSVLRVSALRSVITSGFRAVSVFEVPGSVRSTLGATLRPDHALYSTTMQATPNASHISAFNLRIVSPSAYRVCPLQNDTDTYLGIPADVAAVLPVDVVTDPNILLGMQTTVHIAELVKACHPSPDVVSAVGEHLNWLNKLLLPLKESTQLQGSESYKECLALLGRVHAAMKMVRIGLVVPQLQYRMYGSLINQMAQVAQNYDREFKQFKLFIIQNQILGSYLLQQNRAFAERELQMESFHAAVISQRREELDNTFAKMDRLSGQMEAESSAMEQAKKEMDEGLRQFQNRQVANALFAVLSAVAQIGLAFLTAGATAPGAVASAGQAVSIAGQAAQGLRRVVEILEQLEAVMEVVAAVKDLVDSLEQVGQIVDAPVMPELPSEADWSIFVNEVEAVAEGMPTEVSEVPVWRGRCKTVAALGREMSITAVQMSELQYDIWVQGMMRDMARSQADRLAAIQPADLTNYLEMATQMDMRTTRMLLGLLNILRIQNAALRYEYLLMPTELTTWPLGMDTVGDLLIAQENAALIGLMQLGPSSDFTSRHVVKDIPVNLLLDGEDWEFEIPVQAGMSSFPSSWSRVRIRHLEMHFVKEASGIGGEIIHQPTTQTGTVYILLQGSTIFHDRRRDQVLPFQAAAPLNYHYAYRLDTGDSTLTNEPSEQFANKFMQMTPFTRWRLRLSASAKENAGLAFPTATALDSTTQIVITFHVTAIRQIDWRHDEE

SEQ ID NO: 410 - protein, 867 aa, synthetic construct
  REGION 1..867: note = PtIP-83 polypeptide variant
MALVDYGKLFEDLNQISMGVLDRVEFSEVMVIHRMYVRLADLNVGQLEGAEKVKRLYIFTDVIELPVVEWRWPPQIPGSVTVIILCRLLQWPTDGRQSDTELHLTFMKLHAIQREENRWEITAADGMNWGVYIHAEEVQVGVLTMSWSSVLRVSALRSVITSGFRAVSVFEVPGSVRSTLGATLRPDHALYSTTMQATPNASHISAFNLRIVSPSAYRVCPLQNDTDTYLGIPADVAAVLPVDVVTDPNILLGMQTTVHIAELVKACHPSPDVVSAVGEHLNWLNKLLLPLKESTQLQGSESYKECLALLGRVHAAMKMVRIGLVVPQLQYRMYGSLINQMAQVAQNYDREFKQFKLFIIQNQILGSYLLQQNRAFAERELQMESFHAAVISQRREELDNTFAKMDRLSGQMEAESSAMEQAKKEMDEGLRQFQNRQVANALFAVLSAVAQIGLAFLTAGATAPGAVASAGQAVSIAGQAAQGLRRVVEILEQLEAVMEVVAAVKDLVDSLEQVGQIVDAPVMPELPSEADWSIFVNEVEAVAEGMPTEVSEVPVWIGKCKNVAALGREMSITAVQMSELQYDIWVQGMMRDMARSQADRLAAIQPADLTNYLEMATQMDMRTTRMLLGLLNILRIQNAALRYEYLLMPTELTTWPLGMDTVGDLLIAQENAALIGLMQLGPSSDFTSRHVVKDIPVNLLLDGEDWEFEIPVQAGMSSFPSSWSRVRIRHLEMHFVKEASGIGGEIIHQPTTQTGTVYILLQGSTIFHDRRRDQVLPFQAAAPLNYHYAYRLDTGDSTLTNEPSEQFANKFMQMTPFTRWRLRLSASAKENAGLAFPTATALDSTTQIVITFHVTAIRQIDWRHDEE

SEQ ID NO: 411 - protein, 867 aa, synthetic construct
  REGION 1..867: note = PtIP-83 polypeptide variant
MALVDYGKLFEDLNQISMGVLDRVEFSEVMVIHRMYVRLADLNVGQLEGAEKVKRLYVFCDIIELPVVEWRWPPQIPGSVTVIILCRLLQWPTDGRQSDTELHLTFMKLHAIQREENRWEITAADGMNWGVYIHAEEVQVGVLTMSWSSVLRVSALRSVITSGFRAVSVFEVPGSVRSTLGATLRPDHALYSTTMQATPNASHISAFNLRIVSPSAYRVCPLQNDTDTYLGIPADVAAVLPVDVVTDPNILLGMQTTVHIAELVKACHPSPDVVSAVGEHLNWLNKLLLPLKESTQLQGSESYKECLALLGRVHAAMKMVRIGLVVPQLQYRMYGSLINQMAQVAQNYDREFKQFKLFIIQNQILGSYLLQQNRAFAERELQMESFHAAVISQRREELDNTFAKMDRLSGQMEAESSAMEQAKKEMDEGLRQFQNRQVANALFAVLSAVAQIGLAFLTAGATAPGAVASAGQAVSIAGQAAQGLRRVVEILEQLEAVMEVVAAVKDLVDSLEQVGQIVDAPVMPELPSEADWSIFVNEVEAVAEGMPTEVSEVPVWLARCKNVAALGREMSITAVQMSELQYDIWVQGMMRDMARSQADRLAAIQPADLTNYLEMATQMDMRTTRMLLGLLNILRIQNAALRYEYLLMPTELTTWPLGMDTVGDLLIAQENAALIGLMQLGPSSDFTSRHVVKDIPVNLLLDGEDWEFEIPVQAGMSSFPSSWSRVRIRHLEMHFVKEASGIGGEIIHQPTTQTGTVYILLQGSTIFHDRRRDQVLPFQAAAPLNYHYAYRLDTGDSTLTNEPSEQFANKFMQMTPFTRWRLRLSASAKENAGLAFPTATALDSTTQIVITFHVTAIRQIDWRHDEE

SEQ ID NO: 412 - protein, 867 aa, synthetic construct
  REGION 1..867: note = PtIP-83 polypeptide variant
MALVDYGKLFEDLNQISMGVLDRVEFSEVMVIHRMYVRLADLNVGQLEGAEKVKRLYVFSDIIELPVVEWRWPPQIPGSVTVIILCRLLQWPTDGRQSDTELHLTFMKLHAIQREENRWEITAADGMNWGVYIHAEEVQVGVLTMSWSSVLRVSALRSVITSGFRAVSVFEVPGSVRSTLGATLRPDHALYSTTMQATPNASHISAFNLRIVSPSAYRVCPLQNDTDTYLGIPADVAAVLPVDVVTDPNILLGMQTTVHIAELVKACHPSPDVVSAVGEHLNWLNKLLLPLKESTQLQGSESYKECLALLGRVHAAMKMVRIGLVVPQLQYRMYGSLINQMAQVAQNYDREFKQFKLFIIQNQILGSYLLQQNRAFAERELQMESFHAAVISQRREELDNTFAKMDRLSGQMEAESSAMEQAKKEMDEGLRQFQNRQVANALFAVLSAVAQIGLAFLTAGATAPGAVASAGQAVSIAGQAAQGLRRVVEILEQLEAVMEVVAAVKDLVDSLEQVGQIVDAPVMPELPSEADWSIFVNEVEAVAEGMPTEVSEVPVWIGKCKNVAALGREMSITAVQMSELQYDIWVQGMMRDMARSQADRLAAIQPADLTNYLEMATQMDMRTTRMLLGLLNILRIQNAALRYEYLLMPTELTTWPLGMDTVGDLLIAQENAALIGLMQLGPSSDFTSRHVVKDIPVNLLLDGEDWEFEIPVQAGMSSFPSSWSRVRIRHLEMHFVKEASGIGGEIIHQPTTQTGTVYILLQGSTIFHDRRRDQVLPFQAAAPLNYHYAYRLDTGDSTLTNEPSEQFANKFMQMTPFTRWRLRLSASAKENAGLAFPTATALDSTTQIVITFHVTAIRQIDWRHDEE

SEQ ID NO: 413 - protein, 867 aa, synthetic construct
  REGION 1..867: note = PtIP-83 polypeptide variant
MALVDYGKLFEDLNQISMGVLDRVEFSEVMVIHRMYVRLADLNVGQLEGAEKVKRLYVFSDIIELPVVEWRWPPQIPGSVTVIILCRLLQWPTDGRQSDTELHLTFMKLHAIQREENRWEITAADGMNWGVYIHAEEVQVGVLTMSWSSVLRVSALRSVITSGFRAVSVFEVPGSVRSTLGATLRPDHALYSTTMQATPNASHISAFNLRIVSPSAYRVCPLQNDTDTYLGIPADVAAVLPVDVVTDPNILLGMQTTVHIAELVKACHPSPDVVSAVGEHLNWLNKLLLPLKESTQLQGSESYKECLALLGRVHAAMKMVRIGLVVPQLQYRMYGSLINQMAQVAQNYDREFKQFKLFIIQNQILGSYLLQQNRAFAERELQMESFHAAVISQRREELDNTFAKMDRLSGQMEAESSAMEQAKKEMDEGLRQFQNRQVANALFAVLSAVAQIGLAFLTAGATAPGAVASAGQAVSIAGQAAQGLRRVVEILEQLEAVMEVVAAVKDLVDSLEQVGQIVDAPVMPELPSEADWSIFVNEVEAVAEGMPTEVSEVPVWRGRCKTVAALGREMSITAVQMSELQYDIWVQGMMRDMARSQADRLAAIQPADLTNYLEMATQMDMRTTRMLLGLLNILRIQNAALRYEYLLMPTELTTWPLGMDTVGDLLIAQENAALIGLMQLGPSSDFTSRHVVKDIPVNLLLDGEDWEFEIPVQAGMSSFPSSWSRVRIRHLEMHFVKEASGIGGEIIHQPTTQTGTVYILLQGSTIFHDRRRDQVLPFQAAAPLNYHYAYRLDTGDSTLTNEPSEQFANKFMQMTPFTRWRLRLSASAKENAGLAFPTATALDSTTQIVITFHVTAIRQIDWRHDEE

SEQ ID NO: 414 - protein, 867 aa, synthetic construct
  REGION 1..867: note = PtIP-83 polypeptide variant
MALVDYGKLFEDLNQISMGVLDRVEFSEVMVIHRMYVRLADLNVGQLEGAEKVKRLYVFSDVIELPVVEWRWPPQIPGSVTVIILCRLLQWPTDGRQSDTELHLTFMKLHAIQREENRWEITAADGMNWGVYIHAEEVQVGVLTMSWSSVLRVSALRSVITSGFRAVSVFEVPGSVRSTLGATLRPDHALYSTTMQATPNASHISAFNLRIVSPSAYRVCPLQNDTDTYLGIPADVAAVLPVDVVTDPNILLGMQTTVHIAELVKACHPSPDVVSAVGEHLNWLNKLLLPLKESTQLQGSESYKECLALLGRVHAAMKMVRIGLVVPQLQYRMYGSLINQMAQVAQNYDREFKQFKLFIIQNQILGSYLLQQNRAFAERELQMESFHAAVISQRREELDNTFAKMDRLSGQMEAESSAMEQAKKEMDEGLRQFQNRQVANALFAVLSAVAQIGLAFLTAGATAPGAVASAGQAVSIAGQAAQGLRRVVEILEQLEAVMEVVAAVKDLVDSLEQVGQIVDAPVMPELPSEADWSIFVNEVEAVAEGMPTEVSEVPVWRGKCKSVAALGREMSITAVQMSELQYDIWVQGMMRDMARSQADRLAAIQPADLTNYLEMATQMDMRTTRMLLGLLNILRIQNAALRYEYLLMPTELTTWPLGMDTVGDLLIAQENAALIGLMQLGPSSDFTSRHVVKDIPVNLLLDGEDWEFEIPVQAGMSSFPSSWSRVRIRHLEMHFVKEASGIGGEIIHQPTTQTGTVYILLQGSTIFHDRRRDQVLPFQAAAPLNYHYAYRLDTGDSTLTNEPSEQFANKFMQMTPFTRWRLRLSASAKENAGLAFPTATALDSTTQIVITFHVTAIRQIDWRHDEE

SEQ ID NO: 415 - protein, 867 aa, synthetic construct
  REGION 1..867: note = PtIP-83 polypeptide variant
MALVDYGKLFEDLNQISMGVLDRVEFSEVMVIHRMYVRLADLNVGQLEGAEKVKRLYVFSDVIELPVVEWRWPPQIPGSVTVIILCRLLQWPTDGRQSDTELHLTFMKLHAIQREENRWEITAADGMNWGVYIHAEEVQVGVLTMSWSSVLRVSALRSVITSGFRAVSVFEVPGSVRSTLGATLRPDHALYSTTMQATPNASHISAFNLRIVSPSAYRVCPLQNDTDTYLGIPADVAAVLPVDVVTDPNILLGMQTTVHIAELVKACHPSPDVVSAVGEHLNWLNKLLLPLKESTQLQGSESYKECLALLGRVHAAMKMVRIGLVVPQLQYRMYGSLINQMAQVAQNYDREFKQFKLFIIQNQILGSYLLQQNRAFAERELQMESFHAAVISQRREELDNTFAKMDRLSGQMEAESSAMEQAKKEMDEGLRQFQNRQVANALFAVLSAVAQIGLAFLTAGATAPGAVASAGQAVSIAGQAAQGLRRVVEILEQLEAVMEVVAAVKDLVDSLEQVGQIVDAPVMPELPSEADWSIFVNEVEAVAEGMPTEVSEVPVWRVKCKNVAALGREMSITAVQMSELQYDIWVQGMMRDMARSQADRLAAIQPADLTNYLEMATQMDMRTTRMLLGLLNILRIQNAALRYEYLLMPTELTTWPLGMDTVGDLLIAQENAALIGLMQLGPSSDFTSRHVVKDIPVNLLLDGEDWEFEIPVQAGMSSFPSSWSRVRIRHLEMHFVKEASGIGGEIIHQPTTQTGTVYILLQGSTIFHDRRRDQVLPFQAAAPLNYHYAYRLDTGDSTLTNEPSEQFANKFMQMTPFTRWRLRLSASAKENAGLAFPTATALDSTTQIVITFHVTAIRQIDWRHDEE

SEQ ID NO: 416 - protein, 867 aa, synthetic construct
  REGION 1..867: note = PtIP-83 polypeptide variant
MALVDYGKLFEDLNQISMGVLDRVEFSEVMVIHRMYVRLADLNVGQLEGAEKVMRLYIFADVVELPVVEWRWPPQIPGSVTVIILCRLLQWPTDGRQSDTELHLTFMKLHAIQREENRWEITAADGMNWGVYIHAEEVQVGVLTMSWSSVLRVSALRSVITSGFRAVSVFEVPGSVRSTLGATLRPDHALYSTTMQATPNASHISAFNLRIVSPSAYRVCPLQNDTDTYLGIPADVAAVLPVDVVTDPNILLGMQTTVHIAELVKACHPSPDVVSAVGEHLNWLNKLLLPLKESTQLQGSESYKECLALLGRVHAAMKMVRIGLVVPQLQYRMYGSLINQMAQVAQNYDREFKQFKLFIIQNQILGSYLLQQNRAFAERELQMESFHAAVISQRREELDNTFAKMDRLSGQMEAESSAMEQAKKEMDEGLRQFQNRQVANALFAVLSAVAQIGLAFLTAGATAPGAVASAGQAVSIAGQAAQGLRRVVEILEQLEAVMEVVAAVKDLVDSLEQVGQIVDAPVMPELPSEADWSIFVNEVEAVAEGMPTEVSEVPVWRGKCKSVAALGREMSITAVQMSELQYDIWVQGMMRDMARSQADRLAAIQPADLTNYLEMATQMDMRTTRMLLGLLNILRIQNAALRYEYLLMPTELTTWPLGMDTVGDLLIAQENAALIGLMQLGPSSDFTSRHVVKDIPVNLLLDGEDWEFEIPVQAGMSSFPSSWSRVRIRHLEMHFVKEASGIGGEIIHQPTTQTGTVYILLQGSTIFHDRRRDQVLPFQAAAPLNYHYAYRLDTGDSTLTNEPSEQFANKFMQMTPFTRWRLRLSASAKENAGLAFPTATALDSTTQIVITFHVTAIRQIDWRHDEE

SEQ ID NO: 417 - protein, 867 aa, synthetic construct
  REGION 1..867: note = PtIP-83 polypeptide variant
MALVDYGKLFEDLNQISMGVLDRVEFSEVMVIHRMYVRLADLNVGQLEGAEKVRHLYIFCDVIELPVVEWRWPPQIPGSVTVIILCRLLQWPTDGRQSDTELHLTFMKLHAIQREENRWEITAADGMNWGVYIHAEEVQVGVLTMSWSSVLRVSALRSVITSGFRAVSVFEVPGSVRSTLGATLRPDHALYSTTMQATPNASHISAFNLRIVSPSAYRVCPLQNDTDTYLGIPADVAAVLPVDVVTDPNILLGMQTTVHIAELVKACHPSPDVVSAVGEHLNWLNKLLLPLKESTQLQGSESYKECLALLGRVHAAMKMVRIGLVVPQLQYRMYGSLINQMAQVAQNYDREFKQFKLFIIQNQILGSYLLQQNRAFAERELQMESFHAAVISQRREELDNTFAKMDRLSGQMEAESSAMEQAKKEMDEGLRQFQNRQVANALFAVLSAVAQIGLAFLTAGATAPGAVASAGQAVSIAGQAAQGLRRVVEILEQLEAVMEVVAAVKDLVDSLEQVGQIVDAPVMPELPSEADWSIFVNEVEAVAEGMPTEVSEVPVWIGKCKNVAALGREMSITAVQMSELQYDIWVQGMMRDMARSQADRLAAIQPADLTNYLEMATQMDMRTTRMLLGLLNILRIQNAALRYEYLLMPTELTTWPLGMDTVGDLLIAQENAALIGLMQLGPSSDFTSRHVVKDIPVNLLLDGEDWEFEIPVQAGMSSFPSSWSRVRIRHLEMHFVKEASGIGGEIIHQPTTQTGTVYILLQGSTIFHDRRRDQVLPFQAAAPLNYHYAYRLDTGDSTLTNEPSEQFANKFMQMTPFTRWRLRLSASAKENAGLAFPTATALDSTTQIVITFHVTAIRQIDWRHDEE

SEQ ID NO: 418 - protein, 867 aa, synthetic construct
  REGION 1..867: note = PtIP-83 polypeptide variant
MALVDYGKLFEDLNQISMGVLDRVEFSEVMVIHRMYVRLADLNVGQLEGAEKVRHLYIFSDVVELPVVEWRWPPQIPGSVTVIILCRLLQWPTDGRQSDTELHLTFMKLHAIQREENRWEITAADGMNWGVYIHAEEVQVGVLTMSWSSVLRVSALRSVITSGFRAVSVFEVPGSVRSTLGATLRPDHALYSTTMQATPNASHISAFNLRIVSPSAYRVCPLQNDTDTYLGIPADVAAVLPVDVVTDPNILLGMQTTVHIAELVKACHPSPDVVSAVGEHLNWLNKLLLPLKESTQLQGSESYKECLALLGRVHAAMKMVRIGLVVPQLQYRMYGSLINQMAQVAQNYDREFKQFKLFIIQNQILGSYLLQQNRAFAERELQMESFHAAVISQRREELDNTFAKMDRLSGQMEAESSAMEQAKKEMDEGLRQFQNRQVANALFAVLSAVAQIGLAFLTAGATAPGAVASAGQAVSIAGQAAQGLRRVVEILEQLEAVMEVVAAVKDLVDSLEQVGQIVDAPVMPELPSEADWSIFVNEVEAVAEGMPTEVSEVPVWMVKCKNVAALGREMSITAVQMSELQYDIWVQGMMRDMARSQADRLAAIQPADLTNYLEMATQMDMRTTRMLLGLLNILRIQNAALRYEYLLMPTELTTWPLGMDTVGDLLIAQENAALIGLMQLGPSSDFTSRHVVKDIPVNLLLDGEDWEFEIPVQAGMSSFPSSWSRVRIRHLEMHFVKEASGIGGEIIHQPTTQTGTVYILLQGSTIFHDRRRDQVLPFQAAAPLNYHYAYRLDTGDSTLTNEPSEQFANKFMQMTPFTRWRLRLSASAKENAGLAFPTATALDSTTQIVITFHVTAIRQIDWRHDEE

SEQ ID NO: 419 - protein, 867 aa, synthetic construct
  REGION 1..867: note = PtIP-83 polypeptide variant
MALVDYGKLFEDLNQISMGVLDRVEFSEVMVIHRMYVRLADLNVGQLEGAEKVRHLYIFSDVVELPVVEWRWPPQIPGSVTVIILCRLLQWPTDGRQSDTELHLTFMKLHAIQREENRWEITAADGMNWGVYIHAEEVQVGVLTMSWSSVLRVSALRSVITSGFRAVSVFEVPGSVRSTLGATLRPDHALYSTTMQATPNASHISAFNLRIVSPSAYRVCPLQNDTDTYLGIPADVAAVLPVDVVTDPNILLGMQTTVHIAELVKACHPSPDVVSAVGEHLNWLNKLLLPLKESTQLQGSESYKECLALLGRVHAAMKMVRIGLVVPQLQYRMYGSLINQMAQVAQNYDREFKQFKLFIIQNQILGSYLLQQNRAFAERELQMESFHAAVISQRREELDNTFAKMDRLSGQMEAESSAMEQAKKEMDEGLRQFQNRQVANALFAVLSAVAQIGLAFLTAGATAPGAVASAGQAVSIAGQAAQGLRRVVEILEQLEAVMEVVAAVNDLVDSLEQVGQIVDAPVMPELPSEADWSIFVNEVEAVAEGMPTEVSEVPVWRGKCKSVAALGREMSITAVQMSELQYDIWVQGMMRDMARSQADRLAAIQPADLTNYLEMATQMDMRTTRMLLGLLNILRIQNAALRYEYLLMPTELTTWPLGMDTVGDLLIAQENAALIGLMQLGPSSDFTSRHVVKDIPVNLLLDGEDWEFEIPVQAGMSSFPSSWSRVRIRHLEMHFVKEASGIGGEIIHQPTTQTGTVYILLQGSTIFHDRRRDQVLPFQAAAPLNYHYAYRLDTGDSTLTNEPSEQFANKFMQMTPFTRWRLRLSASAKENAGLAFPTATALDSTTQIVITFHVTAIRQIDWRHDEE

SEQ ID NO: 420 - protein, 867 aa, synthetic construct
  REGION 1..867: note = PtIP-83 polypeptide variant
MALVDYGKLFEDLNQISMGVLDRVEFSEVMVIHRMYVRLADLNVGQLEGAEKVRQLYVFCDVLVLPVVEWRWPPQIPGSVTVIILCRLLQWPTDGRQSDTELHLTFMKLHAIQREENRWEITAADGMNWGVYIHAEEVQVGVLTMSWSSVLRVSALRSVITSGFRAVSVFEVPGSVRSTLGATLRPDHALYSTTMQATPNASHISAFNLRIVSPSAYRVCPLQNDTDTYLGIPADVAAVLPVDVVTDPNILLGMQTTVHIAELVKACHPSPDVVSAVGEHLNWLNKLLLPLKESTQLQGSESYKECLALLGRVHAAMKMVRIGLVVPQLQYRMYGSLINQMAQVAQNYDREFKQFKLFIIQNQILGSYLLQQNRAFAERELQMESFHAAVISQRREELDNTFAKMDRLSGQMEAESSAMEQAKKEMDEGLRQFQNRQVANALFAVLSAVAQIGLAFLTAGATAPGAVASAGQAVSIAGQAAQGLRRVVEILEQLEAVMEVVAAVKDLVDSLEQVGQIVDAPVMPELPSEADWSIFVNEVEAVAEGMPTEVSEVPVWHGKCKNVAALGREMSITAVQMSELQYDIWVQGMMRDMARSQADRLAAIQPADLTNYLEMATQMDMRTTRMLLGLLNILRIQNAALRYEYLLMPTELTTWPLGMDTVGDLLIAQENAALIGLMQLGPSSDFTSRHVVKDIPVNLLLDGEDWEFEIPVQAGMSSFPSSWSRVRIRHLEMHFVKEASGIGGEIIHQPTTQTGTVYILLQGSTIFHDRRRDQVLPFQAAAPLNYHYAYRLDTGDSTLTNEPSEQFANKFMQMTPFTRWRLRLSASAKENAGLAFPTATALDSTTQIVITFHVTAIRQIDWRHDEE

SEQ ID NO: 421 - protein, 867 aa, synthetic construct
  REGION 1..867: note = PtIP-83 polypeptide variant
MALVDYGKLFEDLNQISMGVLDRVEFSEVMVIHRMYVRLADLNVGQLEGAEKVRQLYVFCDVLVLPVVEWRWPPQIPGSVTVIILCRLLQWPTDGRQSDTELHLTFMKLHAIQREENRWEITAADGMNWGVYIHAEEVQVGVLTMSWSSVLRVSALRSVITSGFRAVSVFEVPGSVRSTLGATLRPDHALYSTTMQATPNASHISAFNLRIVSPSAYRVCPLQNDTDTYLGIPADVAAVLPVDVVTDPNILLGMQTTVHIAELVKACHPSPDVVSAVGEHLNWLNKLLLPLKESTQLQGSESYKECLALLGRVHAAMKMVRIGLVVPQLQYRMYGSLINQMAQVAQNYDREFKQFKLFIIQNQILGSYLLQQNRAFAERELQMESFHAAVISQRREELDNTFAKMDRLSGQMEAESSAMEQAKKEMDEGLRQFQNRQVANALFAVLSAVAQIGLAFLTAGATAPGAVASAGQAVSIAGQAAQGLRRVVEILEQLEAVMEVVAAVKDLVDSLEQVGQIVDAPVMPELPSEADWSIFVNEVEAVAEGMPTEVSEVPVWLGRCKNVAALGREMSITAVQMSELQYDIWVQGMMRDMARSQADRLAAIQPADLTNYLEMATQMDMRTTRMLLGLLNILRIQNAALRYEYLLMPTELTTWPLGMDTVGDLLIAQENAALIGLMQLGPSSDFTSRHVVKDIPVNLLLDGEDWEFEIPVQAGMSSFPSSWSRVRIRHLEMHFVKEASGIGGEIIHQPTTQTGTVYILLQGSTIFHDRRRDQVLPFQAAAPLNYHYAYRLDTGDSTLTNEPSEQFANKFMQMTPFTRWRLRLSASAKENAGLAFPTATALDSTTQIVITFHVTAIRQIDWRHDEE

SEQ ID NO: 422 - protein, 867 aa, synthetic construct
  REGION 1..867: note = PtIP-83 polypeptide variant
IALVDYGKLFEDLNQISMGVLDRVEFSEVMVIHRMYVRLADLNVGQLEGAEKVRQLYVFCDVLVLPVVEWRWPPQIPGSVTVIILCRLLQWPTDGRQSDTELHLTFMKLHAIQREENRWEITAADGMNWGVYIHAEEVQVGVLTMSWSSVLRVSALRSVITSGFRAVSVFEVPGSVRSTLGATLRPDHALYSTTMQATPNASHISAFNLRIVSPSAYRVCPLQNDTDTYLGIPADVAAVLPVDVVTDPNILLGMQTTVHIAELVKACHPSPDVVSAVGEHLNWLNKLLLPLKESTQLQGSESYKECLALLGRVHAAMKMVRIGLVVPQLQYRMYGSLINQMAQVAQNYDREFKQFKLFIIQNQILGSYLLQQNRAFAERELQMESFHAAVISQRREELDNTFAKMDRLSGQMEAESSAMEQAKKEMDEGLRQFQNRQVANALFAVLSAVAQIGLAFLTAGATAPGAVASAGQAVSIAGQAAQGLRRVVEILEQLEAVMEVVAAVKDLVDSLEQVGQIVDAPVMPELPSEADWSIFVNEVEAVAEGMPTEVSEVPVWRGKCKSVAALGREMSITAVQMSELQYDIWVQGMMRDMARSQADRLAAIQPADLTNYLEMATQMDMRTTRMLLGLLNILRIQNAALRYEYLLMPTELTTWPLGMDTVGDLLIAQENAALIGLMQLGPSSDFTSRHVVKDIPVNLLLDGEDWEFEIPVQAGMSSFPSSWSRVRIRHLEMHFVKEASGIGGEIIHQPTTQTGTVYILLQGSTIFHDRRRDQVLPFQAAAPLNYHYAYRLDTGDSTLTNEPSEQFANKFMQMTPFTRWRLRLSASAKENAGLAFPTATALDSTTQIVITFHVTAIRQIDWRHDEE

SEQ ID NO: 423 - protein, 867 aa, synthetic construct
  REGION 1..867: note = PtIP-83 polypeptide variant
MALVDYGKLFEDLNQISMGVLDRVEFSEVMVIHRMYVRLADLNVGQLEGAEKVRRLYIFADILELPVVEWRWPPQIPGSVTVIILCRLLQWPTDGRQSDTELHLTFMKLHAIQREENRWEITAADGMNWGVYIHAEEVQVGVLTMSWSSVLRVSALRSVITSGFRAVSVFEVPGSVRSTLGATLRPDHALYSTTMQATPNASHISAFNLRIVSPSAYRVCPLQNDTDTYLGIPADVAAVLPVDVVTDPNILLGMQTTVHIAELVKACHPSPDVVSAVGEHLNWLNKLLLPLKESTQLQGSESYKECLALLGRVHAAMKMVRIGLVVPQLQYRMYGSLINQMAQVAQNYDREFKQFKLFIIQNQILGSYLLQQNRAFAERELQMESFHAAVISQRREELDNTFAKMDRLSGQMEAESSAMEQAKKEMDEGLRQFQNRQVANALFAVLSAVAQIGLAFLTAGATAPGAVASAGQAVSIAGQAAQGLRRVVEILEQLEAVMEVVAAVKDLVDSLEQVGQIVDAPVMPELPSEADWSIFVNEVEAVAEGMPTEVSEVPVWMVKCKNVAALGREMSITAVQMSELQYDIWVQGMMRDMARSQADRLAAIQPADLTNYLEMATQMDMRTTRMLLGLLNILRIQNAALRYEYLLMPTELTTWPLGMDTVGDLLIAQENAALIGLMQLGPSSDFTSRHVVKDIPVNLLLDGEDWEFEIPVQAGMSSFPSSWSRVRIRHLEMHFVKEASGIGGEIIHQPTTQTGTVYILLQGSTIFHDRRRDQVLPFQAAAPLNYHYAYRLDTGDSTLTNEPSEQFANKFMQMTPFTRWRLRLSASAKENAGLAFPTATALDSTTQIVITFHVTAIRQIDWRHDEE

SEQ ID NO: 424 - protein, 867 aa, synthetic construct
  REGION 1..867: note = PtIP-83 polypeptide variant
MALVDYGKLFEDLNQISMGVLDRVEFSEVMVIHRMYVRLADLNVGQLEGAEKVRRLYVFCDVVVLPVVEWRWPPQIPGSVTVIILCRLLQWPTDGRQSDTELHLTFMKLHAIQREENRWEITAADGMNWGVYIHAEEVQVGVLTMSWSSVLRVSALRSVITSGFRAVSVFEVPGSVRSTLGATLRPDHALYSTTMQATPNASHISAFNLRIVSPSAYRVCPLQNDTDTYLGIPADVAAVLPVDVVTDPNILLGMQTTVHIAELVKACHPSPDVVSAVGEHLNWLNKLLLPLKESTQLQGSESYKECLALLGRVHAAMKMVRIGLVVPQLQYRMYGSLINQMAQVAQNYDREFKQFKLFIIQNQILGSYLLQQNRAFAERELQMESFHAAVISQRREELDNTFAKMDRLSGQMEAESSAMEQAKKEMDEGLRQFQNRQVANALFAVLSAVAQIGLAFLTAGATAPGAVASAGQAVSIAGQAAQGLRRVVEILEQLEAVMEVVAAVKDLVDSLEQVGQIVDAPVMPELPSEADWSIFVNEVEAVAEGMPTEVSEVPVWRARCKNVAALGREMSITAVQMSELQYDIWVQGMMRDMARSQADRLAAIQPADLTNYLEMATQMDMRTTRMLLGLLNILRIQNAALRYEYLLMPTELTTWPLGMDTVGDLLIAQENAALIGLMQLGPSSDFTSRHVVKDIPVNLLLDGEDWEFEIPVQAGMSSFPSSWSRVRIRHLEMHFVKEASGIGGEIIHQPTTQTGTVYILLQGSTIFHDRRRDQVLPFQAAAPLNYHYAYRLDTGDSTLTNEPSEQFANKFMQMTPFTRWRLRLSASAKENAGLAFPTATALDSTTQIVITFHVTAIRQIDWRHDEE

SEQ ID NO: 425 - protein, 867 aa, synthetic construct
  REGION 1..867: note = PtIP-83 polypeptide variant
MALVDYGKLFEDLNQISMGVLDRVEFSEVMVIHRMYVRLADLNVGQLEGAEKVRRLYVFTDVLVLPVVEWRWPPQIPGSVTVIILCRLLQWPTDGRQSDTELHLTFMKLHAIQREENRWEITAADGMNWGVYIHAEEVQVGVLTMSWSSVLRVSALRSVITSGFRAVSVFEVPGSVRSTLGATLRPDHALYSTTMQATPNASHISAFNLRIVSPSAYRVCPLQNDTDTYLGIPADVAAVLPVDVVTDPNILLGMQTTVHIAELVKACHPSPDVVSAVGEHLNWLNKLLLPLKESTQLQGSESYKECLALLGRVHAAMKMVRIGLVVPQLQYRMYGSLINQMAQVAQNYDREFKQFKLFIIQNQILGSYLLQQNRAFAERELQMESFHAAVISQRREELDNTFAKMDRLSGQMEAESSAMEQAKKEMDEGLRQFQNRQVANALFAVLSAVAQIGLAFLTAGATAPGAVASAGQAVSIAGQAAQGLRRVVEILEQLEAVMEVVAAVKDLVDSLEQVGQIVDAPVMPELPSEADWSIFVNEVEAVAEGMPTEVSEVPVWIGKCKNVAALGREMSITAVQMSELQYDIWVQGMMRDMARSQADRLAAIQPADLTNYLEMATQMDMRTTRMLLGLLNILRIQNAALRYEYLLMPTELTTWPLGMDTVGDLLIAQENAALIGLMQLGPSSDFTSRHVVKDIPVNLLLDGEDWEFEIPVQAGMSSFPSSWSRVRIRHLEMHFVKEASGIGGEIIHQPTTQTGTVYILLQGSTIFHDRRRDQVLPFQAAAPLNYHYAYRLDTGDSTLTNEPSEQFANKFMQMTPFTRWRLRLSASAKENAGLAFPTATALDSTTQIVITFHVTAIRQIDWRHDEE

SEQ ID NO: 426 - protein, 867 aa, synthetic construct
  REGION 1..867: note = PtIP-83 polypeptide variant
MALVDYGKLFEDLNQISMGVLDRVEFSEVMVIHRMYVRLADLNVGQLEGAEKVRRLYVFTDVLVLPVVEWRWPPQIPGSVTVIILCRLLQWPTDGRQSDTELHLTFMKLHAIQREENRWEITAADGMNWGVYIHAEEVQVGVLTMSWSSVLRVSALRSVITSGFRAVSVFEVPGSVRSTLGATLRPDHALYSTTMQATPNASHISAFNLRIVSPSAYRVCPLQNDTDTYLGIPADVAAVLPVDVVTDPNILLGMQTTVHIAELVKACHPSPDVVSAVGEHLNWLNKLLLPLKESTQLQGSESYKECLALLGRVHAAMKMVRIGLVVPQLQYRMYGSLINQMAQVAQNYDREFKQFKLFIIQNQILGSYLLQQNRAFAERELQMESFHAAVISQRREELDNTFAKMDRLSGQMEAESSAMEQAKKEMDEGLRQFQNRQVANALFAVLSAVAQIGLAFLTAGATAPGAVASAGQAVSIAGQAAQGLRRVVEILEQLEAVMEVVAAVKDLVDSLEQVGQIVDAPVMPELPSEADWSIFVNEVEAVAEGMPTEVSEVPVWRARCKNVAALGREMSITAVQMSELQYDIWVQGMMRDMARSQADRLAAIQPADLTNYLEMATQMDMRTTRMLLGLLNILRIQNAALRYEYLLMPTELTTWPLGMDTVGDLLIAQENAALIGLMQLGPSSDFTSRHVVKDIPVNLLLDGEDWEFEIPVQAGMSSFPSSWSRVRIRHLEMHFVKEASGIGGEIIHQPTTQTGTVYILLQGSTIFHDRRRDQVLPFQAAAPLNYHYAYRLDTGDSTLTNEPSEQFANKFMQMTPFTRWRLRLSASAKENAGLAFPTATALDSTTQIVITFHVTAIRQIDWRHDEE

SEQ ID NO: 427 - protein, 867 aa, synthetic construct
  REGION 1..867: note = PtIP-83 polypeptide variant
MALVDYGKLFEDLNQISMGVLDRVEFSEVMVIHRMYVRLADLNVGQLEGAEKVRRLYVFTDVLVLPVVEWRWPPQIPGSVTVIILCRLLQWPTDGRQSDTELHLTFMKLHAIQREENRWEITAADGMNWGVYIHAEEVQVGVLTMSWSSVLRVSALRSVITSGFRAVSVFEVPGSVRSTLGATLRPDHALYSTTMQATPNASHISAFNLRIVSPSAYRVCPLQNDTDTYLGIPADVAAVLPVDVVTDPNILLGMQTTVHIAELVKACHPSPDVVSAVGEHLNWLNKLLLPLKESTQLQGSESYKECLALLGRVHAAMKMVRIGLVVPQLQYRMYGSLINQMAQVAQNYDREFKQFKLFIIQNQILGSYLLQQNRAFAERELQMESFHAAVISQRREELDNTFAKMDRLSGQMEAESSAMEQAKKEMDEGLRQFQNRQVANALFAVLSAVAQIGLAFLTAGATAPGAVASAGQAVSIAGQAAQGLRRVVEILEQLEAVMEVVAAVKDLVDSLEQVGQIVDAPVMPELPSEADWSIFVNEVEAVAEGMPTEVSEVPVWTVKCKNVAALGREMSITAVQMSELQYDIWVQGMMRDMARSQADRLAAIQPADLTNYLEMATQMDMRTTRMLLGLLNILRIQNAALRYEYLLMPTELTTWPLGMDTVGDLLIAQENAALIGLMQLGPSSDFTSRHVVKDIPVNLLLDGEDWEFEIPVQAGMSSFPSSWSRVRIRHLEMHFVKEASGIGGEIIHQPTTQTGTVYILLQGSTIFHDRRRDQVLPFQAAAPLNYHYAYRLDTGDSTLTNEPSEQFANKFMQMTPFTRWRLRLSASAKENAGLAFPTATALDSTTQIVITFHVTAIRQIDWRHDEE

SEQ ID NO: 428 - DNA, 2556 bp, synthetic construct
  misc_feature 1..2556: note = PtIP-83 polypeptide variant encoding polynucleotide
  source 1..2556: mol_type = other DNA
atggattacagcacgctttacagggatctgaaccagataagcatgcccctggatcgggtagagttctcagaggtgatggtaatccacaggatgtacttgaggttatctgatctgaatgtgggggagctccccggagccgagagggtgaagcggttgtatgtgttggcagacgtggtggagctcgcaacatttgcgcatccacagttgcttaatacgcggatgccaggatcggtgacggtgatcattctgtgtcgtcttcttcagtttccaactgatgggtcgttcgctgcttggctcgagctgccgttcatggagttgcacacactcatagaacaatacaggtcagagataaaagcagcagatgacgcgaaatggggaacgtatgtacacgcagaggaagtacagctcagcccgctgtttaatgggtggccttatctggttgttgaggcacagcgctgtattataaccgcggccatgcacaatacatttaaccgccctgggtgggttcgctccattactcaatttacaactgatcagtccggtcgggtagataccacactgctcgcacgaacagaattcggccatattgatctaccactcgaaacagattccccaacggcattcagtgtttcacaccgccaaagtacgaatttgcccgtagagtacaccggtattccagtggaggtggtgaccgatcctaacatcttgatgggcatgcaaaccagcgtgcacattgcggagctagtgaaggcatgttacccgtcaccagaattagtgagcgctgtaggggtgcacgtgaattggctcaacgaagtcttgctccgagttgtccagaaggaatctcagttgcaagggaccgaggcctacaacgagtgccttgcgcttttaggtcgcattcaatgtgtcatgaagatggggccgtttgtctcggtagtgccgcagctgcaatacagaatgtacggtagcctcatcaaccaaatggcccaagtagcacaaaactacgaccgagaattcaagcaattcaaattattcatcatccaaaatcaaatccttggcagctatttgctgcagcagaacagggcatttgctgagagggagctgcagatggagagctttcatgctgctgtcatttctcaaagaagggaggagttggacaatacattcgcaaagatggaccgattgagcgggcaaatggaggcagagagtagtgcaatggagcaagccaaaaaggaaatggacgaaggattgaggcagttccagaataggcaagttgcgaacgccctctttgccgttcttagcgctgtagctcagattgggcttgcattccttacggctggtgcaacggctcctggagctgtggcgtcggcggggcaagctgtgagcatagcaggtcaggcggcgcaaggtctgcgaagggtggtggaaattctagagcagctggaggctgtgatggaggttgtggctgctgtgaaggaccttgtggatgctctggaccaggtaagtcagattgtggatgcaccacctatgccagacatgccctcggaggcggactggagtatttttgtgaatgagattgaagccgtggcagaggggatgccgacggaagtctcggaggttccggcgtggaaggccaagtgcaagaatgtggctgcactgggtagggagatgtgcatcacggcagaacagatttcccagctccagtatgacatctgggtgcaaggcttgttgcgggatatggctcgaagccaggcagacaggctggccgcaattcaacctgctaatcttaccaactatttggagatggcaatacagatggatatgcggactacgaggatactgatagggctcctcaacataatgcgcatccagaatgcggcacttatgtatgagtaccttctaacgcccacgcagctcactgcatggccgctgagaatggatactgtggccaacttgctcatcacgcacgagagtgctgcactgtcaggattagctcagttagggcccccatcggacttcacgagcaggcatgtagtgaaaggcatacctgtgagcttgcttctagacggtggggattgggaatttgagattcctgtgcaaggtggcatgtccagtttcccttccagctggactcgagtgcggattcggcacctggagatgcactttgtgcaggaggcgagcggtggcggcgagattatccaccagcctgccacccagacggggaccatttacatcctcctgcagggctccactgtcttccatgatcgcagaagggaggaggtgatgacctttcaggcagcggttccgctcaactaccattacgcgtaccgcctcgacactggagaagccactcttacgaacgagccctcggaacagtttgccaacacattcatgcagatgacaccgttcactcactggaggctacgtctgtctgcgtccgcagcggagaataaaggattagcctttcccacagctacagctcccgactccaccactgagattgccatcactttccatgttacggccattagacaaattgactggcggcaagaggaggag

SEQ ID NO: 429 - DNA, 2559 bp, synthetic construct
  misc_feature 1..2559: note = PtIP-83 polypeptide variant encoding polynucleotide
  source 1..2559: mol_type = other DNA
atggattacagcacgctttacagggatctgaaccagataagcatgcccctggatcgggtagagttctcagaggtgatggtaatccacaggatgtacttgaggttatctgatctgaatgtgggggagctccccggagccgagagggtgaagcggttgtatgtgttggcagacgtggtggagctcgcaacatttgcgcatccacagttgcttaatacgcggatgccaggatcggtgacggtgatcattctgtgtcgtcttcttcagtttccaactgatgggtcgttcgctgcttggctcgagctgccgttcatggagttgcacacactcatagaacaatacaggtcagagataaaagcagcagatgacgcgaaatggggaacgtatgtacacgcggaggaagtacagctcagcccgctgtttaatgggtggccttatctggttgttgaggcacagcgctgtattataaccgcggccatgcacaatacatttaaccgccctgggtgggttcgctccattactcaatttacaactgatcagtccggtcgggtagataccacactgctcgcacgaacagaattcggccatattgatctaccactcgaaacagattccccaacggcattcagtgtttcacaccgccaaagtacgaatttgcccgtagagtacaccggtattccagtggaggtggtgaccgatcctaacatcttgatgggcatgcaaaccagcgtgcacattgcggagctagtgaaggcatgttacccgtcaccagaattagtgagcgctgtaggggtgcacgtgaattggctcaacgaagtcttgctccgagttgtccagaaggaatctcagttgcaagggaccgaggcctacaacgagtgccttgcgcttttaggtcgcattcaatgtgtcatgaagatggggccgtttgtctcggtagtgccgcagctgcaatacagaatgtatggtagcctcatcagacaaatggcccaggtagcacaaaactacgaccgagaattcaagcaattcaaattattcatcatccaaaatcaaatccttggcagctatttgctgcagcagaacagggcatttgctgagagggagctgcagatggagagctttcatgctgctgtcatttctcaaagaagggaggagttggacaatacattcgcaaagatggaccgattgagcgggcaaatggaggcagagagtagtgcaatggagcaagccaaaaaggaaatggacgaaggattgaggcagttccagaataggcaagttgcaagggctgtgttcgctgttcttaaatctgtagctatgattgcgctcgcattcgtcacggctggtgcaacggctcctggggctgcagcatctgcagcgcaagctgtgaacatagccggtcaagcggcacaagctctgcgaagggtggtggaaattctagagcagctggaggctgtgatggaggttgtggctgctataaagcaccttgtggatgctctggaccaggtaagtcagattgtggatgcaccacctatgccagacatgccctcggaggcggactggagtatttttgtgaatgagattgaagccgtggcagaggggatgccgacggaagtctcggaggttccggtgtggagggccaagtgcaagaatgtggctgcactgggtcgggagatgagcatcacggcagtacagatgtcggagctgcagtatgacatctgggtgcaaggcatgatgcgggatatggctcgaagccaggcagacaggctggccgcaattcaacccgcggaccttaccaactatttggagatggctacccagatggatatgcggactacgaggatgctgctggggctcctcaacataatgcgcatccagaatgcggcacttatgtatgagtaccttctaacgcccacgcagctcactgcatggccgctgagaatggatactgtggccaacttgctcatcacgcacgagagtgctgcactgtcaggattagctcagttagggcccccatcggacttcacgagcaggcatgtagtgaaaggcatacctgtgagcttgcttctagacggtggggattgggaatttgagattcctgtgcaaggtggcatgtccagtttcccttccagctggactcgagtgcggattcggcacctggagatgcactttgtgaaggaggccagcggtattggtggtgagattatccaccagcctgccacccagacggggaccatttacatcctcctgcagggctccactgtcttccatgatcgcagaagggaggaggtgatgacctttcaggcagcggttccgctcaactaccattacgcgtaccgcctcgacactggagaagccactcttacgaacgagccctcggaacagtttgccaacacattcatgcagatgacaccgttcactcactggaggctacgtctgtctgcgtccgcagcggagaataaaggattagcctttcccacagctacagctcccgactccaccactgagattgccatcactttccatgttacggccattagacaaattgactggcggcaagaggaggag

SEQ ID NO: 430 - DNA, 2559 bp, synthetic construct
  misc_feature 1..2559: note = PtIP-83 polypeptide variant encoding polynucleotide
  source 1..2559: mol_type = other DNA
atggattacagcacgctttacagggatctgaaccagataagcatgcccctggatcgggtagagttctcagaggtgatggtaatccacaggatgtacttgaggttatctgatctgaatgtgggggagctccccggagccgagagggtgaagcggttgtatgtgttggcagacgtggtggagctcgcaacatttgcgcatccacagttgcttaatacgcggatgccaggatcggtgacggtgatcattctgtgtcgtcttcttcagtttccaactgatgggtcgttcgctgcttggctcgagctgccgttcatggagttgcacacactcatagaacaatacaggtcagagataaaagcagcagatgacgcgaaatggggaacgtatgtacacgcggaggaagtacagctcagcccgctgtttaatgggtggccttatctggttgttgaggcacagcgctgtattataaccgcggccatgcacaatacatttaaccgccctgggtgggttcgctccattactcaatttacaactgatcagtccggtcgggtagataccacactgctcgcacgaacagaattcggccatattgatctaccactcgaaacagattccccaacggcattcagtgtttcacaccgccaaagtacgaatttgcccgtagagtacaccggtattccagtggaggtggtgaccgatcctaacatcttgatgggcatgcaaaccagcgtgcagattgcggagctagtgaaggcatgttacccgtcaccagaattagtgagcgctgtaggggtgcacgtgaattggctcaacgaagtcttgctccgagttgtccagaaggaatctcagttgcaagggaccgaggcctacaacgagtgccttgcgcttttaggtcgcattcaatgtgtcatgaagatggggccgtttgtctcggtagtgccgcagctgcaatacagaatgtatggtagcctcatcagacaaatggcccaggtagcacagaactacgaccaagatttcaggcagctcaagttattcattgcccaaaaccaaatccttggcagctatttgctgcagcagaacaaggcctttgctgacagagaggtgcagatggagagctttcattcagcggtcatttctcaaagaaggcaggagttggacgacgccatcgctaagatggaccgactgagcttgcagatggaggaagaggacagagcaatggagcaagcccgaaaagaaatggaagaaggattgaagcagttccagaatgagcaagttgcaagggctgtgttcgctgttcttaaatctgtagctatgattgcgctcgcattcgtcacggctggtgcaacggctcctggggctgcagcatctgcagcgcaagctgtgaacatagccggtcaagcggcacaagctctgcgaagggtggtggaaattctagaggggctcgaggctgtgatggaggttgtggctgctataaagcaccttgtggatgctctggaccaggtaagtcagattgtggatgcaccacctatgccagacatgccctcggaggcggactggagtatttttgtgaatgagattgaagccgtggcagaggggatgccgacggaagtctcggaggttccggcgtggaaggccaagtgcaagaatgtggctgcactgggtcgggagatgagcatcacggcagtacagatgtcggagctgcagtatgacatctgggtgcaaggcttgttgcgggatatagctcaaagccacgcagaccggctggcagcgattcaacctgctaatcttaccaactatttggagatggcaatacagatggatatgcggactacgaggatactgatagggctcctcaacataatgcgcatccagaatgcggcacttatgtatgagtaccttctaacgcccacgcagctcactgcatggccgctgagaatggatactgtggccaacttgctcatcacgcacgagagtgctgcactgtcaggattagctcagttagggcccccatcggacttcacgagcaggcatgtagtgaaaggcatacctgtgagcttgcttctagacggtggggattgggaatttgagattcctgtgcaaggtggcatgtccagtttcccttccagctggactcgagtgcggattcggcacctggagatgcactttgtgaaggaggccagcggtattggtggtgagattatccaccagcctaccacccagactgggaccgtttacatccttctgcagggttccactatcttccatgaccgcagaagagaccaggtgttgccttttcaggccgctgctccgctcaactaccattacgcgtaccgcctcgacactggagaagccactcttacgaacgagccctcggaacagtttgccaacacattcatgcagatgacaccgttcactcactggaggctacgtctgtctgcgtccgcagcggagaataaaggattagcctttcccacagctacagctcccgactccaccactgagattgccatcactttccatgttacggccattagacaaattgactggcggcaagaggaggag

SEQ ID NO: 431 - DNA, 2556 bp, synthetic construct
  misc_feature 1..2556: note = PtIP-83 polypeptide variant encoding polynucleotide
  source 1..2556: mol_type = other DNA
atggattacagcacgctttacagggatctgaaccagataagcatgcccctggatcgggtagagttctcagaggtgatggtaatccacaggatgtacttgaggttatctgatctgaatgtgggggagctccccggagccgagagggtgaagcggttgtatgtgttggcagacgtggtggagctcgcaacatttgcgcatccacagttgcttaatacgcggatgccaggatcggtgacggtgatcattctgtgtcgtcttcttcagtttccaactgatgggtcgttcgctgcttggctcgagctgccgttcatggagttgcacacactcatagaacaatacaggtcagagataaaagcagcagatgacgcgaaatggggaacgtatgtacacgcggaggaagtacagctcagcccgctgtttaatgggtggccttatctggttgttgaggcacagcgctgtattataaccgcggccatgcacaatacatttaaccgccctgggtgggttcgctccattactcaatttacaactgatcagtccggtcgggtagataccacactgctcgcacgaacagaattcggccatattgatctaccactcgaaacagattccccaacggcattcagtgtttcacaccgccaaagtacgaatttgcccgtagagtacaccggtattccagtggaggtggtgaccgatcctaacatcttgatgggcatgcaaaccagcgtgcacattgcggagctagtgaaggcatgttacccgtcaccagaattagtgagcgctgtaggggtgcacgtgaattggctcaacgaagtcttgctccgagttgtccagaaggaatctcagttgcaagggaccgaggcctacaacgagtgccttgcgcttttaggtcgcattcaatgtgtcatgaagatggggccgtttgtctcggtagtgccgcagctgcaatacagaatgtatggtagcctcatcagacaaatggcccaggtagcacagaactacgaccaagatttcaggcagctcaagttattcattgcccaaaaccaaatccttggcagctatttgctgcagcagaacaaggcctttgctgacagagaggtgcagatggagagctttcattcagcggtcatttctcaaagaaggcaggagttggacgacgccatcgctaagatggaccgactgagcttgcagatggaggaagaggacagagcaatggagcaagcccgaaaagaaatggaagaaggattgaagcagttccagaatgagcaagttgcaagggctgtgttcgctgttcttaaatctgtagctatgattgcgctcgcattcgtcacggctggtgcaacggctcctggggctgcagcatctgcagcgcaagctgtgaacatagccggtcaagcggcacaagctctgcgaagggtggtggaaattctagagcagctggaggctgtgatggaggttgtggctgctgtgaaggacctcgtggattcattggaacaggtaggtcagattgtggacgcaccggtgatgccggaattgccctcagaggcggactggtccatttttgtgaacgaggtggaggccgtggcagagggcatgccaacggaagtctcggaggttccggtgtggagggccaagtgcaagaatgtggctgcactgggtcgggagatgagcatcacggcagtacagatgtcggagctccagtatgacatctgggtgcaaggcttgttgcgggatatagctcaaagccacgcagaccggctggcagcgattcaacctgctaatcttaccaactatttggagatggcaatacagatggatatgcggactacgaggatactgatagggctcctcaacataatgcgcatccagaatgcggcacttatgtatgagtaccttctaacgcccacgcagctcactgcatggccgctgagaatggatactgtggccaacttgctcatcacgcacgagagtgctgcactgtcaggattagctcagttagggcccccatcggacttcacgagcaggcatgtagtgaaaggcatacctgtgagcttgcttctagacggtggggattgggaatttgagattcctgtgcaagctggcatgtccagtttcccttccagctggactcgagtgcggattcggcacctggagatgcactttgtgcaggaggcgagcggtggcggcgagattatccaccagcctgccacccagacggggaccatttacatcctcctgcagggctccactgtcttccatgatcgcagaagggaggaggtgatgacctttcaggcagcggttccgctcaactaccattacgcgtaccgcctcgacactggagaagccactcttacgaacgagccctcggaacagtttgccaacacattcatgcagatgacaccgttcactcactggaggctacgtctgtctgcgtccgcagcggagaataaaggattagcctttcccacagctacagctcccgactccaccactgagattgccatcactttccatgttacggccattagacaaattgactggcggcaagaggaggag

SEQ ID NO: 432 - DNA, 2553 bp, synthetic construct
  misc_feature 1..2553: note = PtIP-83 polypeptide variant encoding polynucleotide
  source 1..2553: mol_type = other DNA
atggattacagcacgctttacagggatctgaaccagataagcatgcccctggatcgggtagagttctcagaggtgatggtaatccacaggatgtacttgaggttatctgatctgaatgtgggggagctccccggagccgagagggtgaagcggttgtatgtgtttgcagacgtggtggagctcgcaacatttgcgcatccacagttgcttaatacgcggatgccaggatcggtgacggtgatcattctgtgtcgtcttcttcagtttccaactgatgggtcgttcgctgcttggctcgagctgccgttcatggagttgcacacactcatagaacaatacaggtcagagataaaagcagcagatgacgcgaaatggggaacgtatgtacacgcggaggaagtacagctcagcccgctgtttaatgggtggccttatctggttgttgaggcacagcgctgtattataaccgcggccatgcacaatacatttaaccgccctgggtgggttcgctccattactcaatttacaactgatcagtccggtcgggtagataccacactgctcgcacgaacagaattcggccatattgatctaccactcgaaacagattccccaacggcattcagtgtttcacaccgccaaagtacgaatttgcccgtagagtacaccggtattccagtggaggtggtgaccgatcctaacatcttgatgggcatgcagacaacggtacacattgcggagctagtcaaggcatgtcatccgtcacccgatgttgtgagcgctgtaggggagcacctgaactggctcaacaaactcttactcccacttaaggaatcgactcagttgcaaggaagcgagtcgtacaaggagtgccttgcactcttgggtcgtgttcacgctgcgatgaagatggtgagaattggcttagtagtgccccagctgcaatacagaatgtacggtagcctcatcaaccaaatggcccaagtagcacaaaactacgaccgagaattcaagcaattcaaattattcatcatccaaaatcaaatccttggcagctatttgctgcagcagaacagggcatttgctgagagggagctgcagatggagagctttcattcagcggtcatttctcaaagaaggcaggagttggacgacgccatcgctaagatggaccgactgagcttgcagatggaggaagaggacagagcaatggagcaagcccgaaaagaaatggaagaaggattgaagcagttccagaatgagcaagttgcaagggctgtgttcgctgttcttaaatctgtagctatgattgcgctcgcattcgtcacggctggtgcaacggctcctggagctgtggcgtcggcggggcaagctgtgagcatagcaggtcaggcggcgcaaggtctgcgaagggtggtggaaattctagaggggctcgaggctgtgatggaggttgtggctgctataaagcaccttgtggatgctctggaccaggtaagtcagattgtggatgcaccacctatgccagacatgccctcggaggcggactggagtatttttgtgaatgagattgaagccgtggcagaggggatgccgacggaagtctcggaggttccggcgtggaaggccaagtgcaagaatgtggctgcactgggtagggagatgtgcatcacggcagaacagatttcccagctccagtatgacatctgggtgcaaggcttgttgcgggatatagctcaaagccacgcagaccggctggcagcgattcaacctgctaatcttaccaactatttggagatggcaatacagatggatatgcggactacgaggatactgatagggctcctcaacataatgcgcatccagaatgcggcacttatgtatgagtaccttctaacgcccacgcagctcactgcatggccgctgagaatggatactgtggccaacttgctcatcacgcacgagagtgctgcactgtcaggattagctcagttagggcccccatcggacttcacgagcaggcatgtagtgaaaggcatacctgtgagcttgcttctagacggtggggattgggaatttgagattcctgtgcaaggtggcatgtccagtttcccttccagctggactcgagtgcggattcggcacctggagatgcactttgtgcaggaggcgagcggtggcggcgagattatccaccagcctgccacccagacggggaccatttacatcctcctgcagggttccactatcttccatgaccgcagaagagaccaggtgttgccttttcaggccgctgctccgctcaactaccattacgcgtaccgcctcgacaccggcgactccactctcacaaacgaaccctctgaacagtttgccaacaagttcatgcagatgacacccttcacccgttggaggcttcgtctgtctgcgtccgcagcggagaataaaggattagcctttcccacagctacagctcccgactccaccactgagattgccatcactttccatgttacggccattagacaaattgactggcggcaagaggaggag

SEQ ID NO: 433 - DNA, 2563 bp, synthetic construct
  misc_feature 1..2563: note = PtIP-83 polypeptide variant encoding polynucleotide
  source 1..2563: mol_type = other DNA
atggattacagcacgctttacagggatctgaaccagataagcatgcccctggatcgggtagagttctcagaggtgatggtaatccacaggatgtacttgaggttatctgatctgaatgtgggggagctccccggagccgagagggtgaagcggttgtatgtgttggcagacgtggtggagctcgcaacatttgcgcatccacagttgcttaatacgcggatgccaggatcggtgacggtgatcattctgtgtcgtcttcttcagtttccaactgatgggtcgttcgctgcttggctcgagctgccgttcatggagttgcacacactcatagaacaatacaggtcagagataaaagcagcagatgacgcgaaatggggaacgtatgtacacgcggaggaagtacagctcagcccgctgtttaatgggtggccttatctggttgttgaggcacagcgctgtattataaccgcggccatgcacaatacatttaaccgccctgggtgggttcgctccattactcaatttacaactgatcagtccggtcgggtagataccacactgctcgcacgaacagaattcggccatattgatctaccactcgaaacagattccccaacggcattcagtgtttcacaccgccaaagtacgaatttgcccgtagagtacaccggtattccagtggaggtggtgaccgatcctaacatcttgatgggcatgcaaaccagcgtgcacattgcggagctagtcaaggcatgtcatccgtcacccgatgttgtgagcgctgtaggggtgcacgtgaattggctcaacgaagtcttgctccgagttgtccagaaggaatctcagttgcaagggaccgaggcctacaacgagtgccttgcgcttttaggtcgcattcaatgtgtcatgaagatggggccgtttgtctcggtagtgccgcagctgcaatacagaatgtatggtagcctcatcagacaaatggcccaggtagcacagaactacgaccaagatttcaggcagctcaagttattcattgcccaaaaccaaatccttggcagctatttgctgcagcagaacaaggcctttgctgacagagaggtgcagatggagagctttcattcagcggtcatttctcaaagaaggcaggagttggacgacgccatcgctaagatggaccgactgagcttgcagatggaggaagaggacagagcaatggagcaagcccgaaaagaaatggaagaaggattgaagcagttccagaatgagcaagttgcaagggctgtgttcgctgttcttaaatctgtagctatgattgcgctcgcattcgtcacggctggtgcaacggctcctggggctgcagcatctgcagcgcaagctgtgaacatagccggtcaagcggcacaagctctgcgaagggtggtggaaattctagagcagctggaggctgtgatggaggttgtggctgctgtgaaggacctcgtggattcattggaccaggtaggtcagattgtggacgcaccggtgatgccggaattgccctcagaggcggactggtccatttttgtgaacgaggtggaggccgtggcagaggggatgccgacggaagtctcggaggttccggcgtggaaggccaagtgcaagaatgtggctgcactgggtagggagatgtgcatcacggcagaacagatttcccagctccagtatgacatctgggtgcaaggcttgttgcgggatatagctcaaagccacgcagaccggctggcagcgattcaacctgctaatcttaccaactatttggagatggcaatacagatggatatgcggactacgaggatactgatagggctcctcaacataatgcgcatccagaatgcggcacttatgtatgagtaccttctaacgcccacgcagctcactgcatggccgctgagaatggatactgtggccaacttgctcatcacgcacgagagtgctgcactgtcaggattagctcagttagggcccccatcggacttcacgagcaggcatgtggtgaaagacatacctgtgaacttgctgctcgatggcgaggattgggagtttgagattcctgtgcaagctggcatgtccagcttcccttccagctggtctcgcgtccgtattcggcacctggagatgcactttgtgaaggaggccagcggtattggtggtgagattatccaccagcctaccacccagactgggaccgtttacatccttctgcagggttccactatcttccatgaccgcagaagagaccaggtgttgccttttcaggccgctgctccgctcaactaccattacgcgtaccgcctcgacaccggcgactccactctcacaaacgaaccctctgaacagtttgccaacaagttcatgcagatgacacccttcacccgttggaggcttcgtctgtctgcgtccgcaaaagagaatgcaggattagcctttcccacggctacagcacttgactccactacccagattgtcatcactttccatgttacggccatcagacaaattgactggcggcacgacgaagagtagc

SEQ ID NO: 434 - DNA, 2559 bp, synthetic construct
  misc_feature 1..2559: note = PtIP-83 polypeptide variant encoding polynucleotide
  source 1..2559: mol_type = other DNA
atggattacagcacgctttacagggatctgaaccagataagcatgcccctggatcgggtagagttctcagaggtgatggtaatccacaggatgtacttgaggttatctgatctgaatgtgggggagctccccggagccgagaaagtgaagcggttgtatgtgttggcggacgtggtggagctcgcaacatttgcgcatccacagttgcttaatacgcggatgccaggatcggtgacggtgatcattctgtgtcgtcttcttcagtttccaactgatgggtcgttcgctgcttggctcgagctgccgttcatggagttgcacacactcatagaacaatacaggtcagagataaaagcagcagatgacgcgaaatggggaacgtatgtacacgcggaggaagtacagctcagcccgctgtttaatgggtggccttatctggttgttgaggcacagcgctgtattataaccgcggccatgcacaatacatttaaccgccctgggtgggttcgctccattactcaatttacaactgatcagtccggtcgggtagataccacactgctcgcacgaacagaattcggccatattgatctaccactcgaaacagattccccaacggcattcagtgtttcacaccgccaaagtacgaatttgcccgtagagtacaccggtattccagtggaggtggtgaccgatcctaacatcttgatgggcatgcaaaccagcgtgcacattgcggagctagtgaaggcatgttacccgtcaccagaattagtgagcgctgtaggggtgcacgtgaattggctcaacgaagtcttgctccgagttgtccagaaggaatctcagttgcaagggaccgaggcctacaacgagtgccttgcgcttttaggtcgcattcaatgtgtcatgaagatggggccgtttgtctcggtagtgccgcagctgcaatacagaatgtatggtagcctcatcagacaaatggcccaggtagcacagaactacgaccaagatttcaggcagctcaagttattcattgcccaaaaccaaatccttggcagctatttgctgcagcagaacaaggcctttgctgacagagaggtgcagatggagagctttcattcagcggtcatttctcaaagaaggcaggagttggacgacgccatcgctaagatggaccgactgagcttgcagatggaggaagaggacagagcaatggagcaagccaaaaaggaaatggacgaaggattgaggcagttccagaataggcaagttgcgaacgccctctttgccgttcttagcgctgtagctcagattgggcttgcattccttacggctggtgcaacggctcctggagctgtggcgtcggcggggcaagctgtgagcatagcaggtcaggcggcgcaaggtctgcgaagggtggtggaaattctagagcagctggaggctgtgatggaggttgtggctgctataaagcaccttgtggatgctctggaccaggtaagtcagattgtggatgcaccacctatgccagacatgccctcggaggcggactggagtatttttgtgaatgagattgaagccgtggcagaggggatgccgacggaagtctcggaggttccggcgtggaaggccaagtgcaagaatgtggctgcactgggtagggagatgtgcatcacggcagaacagatttcccagctccagtatgacatctgggtgcaaggcttgttgcgggatatagctcaaagccaggcagacaggctggccgcaattcaacccgcggaccttaccaactatttggagatggctacccagatggatatgcggactacgaggatgctgctggggctcctcaacatattgcgcatccagaatgcggcgctcaggtacgagtatcttctaatgcccacggagctcacaacatggccactgggtatggataccgtgggtgacttgctcatcgcgcaggagaatgctgcactgataggattaatgcagctagggccctcatctgatttcacgagcaggcatgtggtgaaagacatacctgtgaacttgctgctcgatggcgaggattgggagtttgagattcctgtgcaagctggcatgtccagcttcccttccagctggtctcgcgtccgtattcggcacctggagatgcactttgtgaaggaggccagcggtattggtggtgagattatccaccagcctaccacccagactgggaccgtttacatccttctgcagggttccactatcttccatgaccgcagaagagaccaggtgttgccttttcaggccgctgctccgctcaactaccattacgcgtaccgcctcgacactggagaagccactcttacgaacgagccctcggaacagtttgccaacacattcatgcagatgacaccgttcactcactggaggctacgtctgtctgcgtccgcagcggagaataaaggattagcctttcccacagctacagctcccgactccaccactgagattgccatcactttccatgttacggccattagacaaattgactggcggcaagaggaggag

SEQ ID NO: 435 - DNA, 2559 bp, synthetic construct
  misc_feature 1..2559: note = PtIP-83 polypeptide variant encoding polynucleotide
  source 1..2559: mol_type = other DNA
atggattacagcacgctttacagggatctgaaccagataagcatgcccctggatcgggtagagttctcagaggtgatggtaatccacaggatgtatgtgaggctagctgatctgaatgtgggggagctccccggagccgagaaagtgaagcggttgtatgtgttggcagacgtggtggagctcgcaacatttgcgcatccacagttgcttaatacgcggatgccaggatcggtgacggtgatcattctgtgtcgtcttcttcagtttccaactgatgggtcgttcgctgcttggctcgagctgccgttcatggagttgcacacactcatagaacaatacaggtcagagataaaagcagcagatgacgcgaaatggggaacgtatgtacacgcggaggaagtacagctcagcccgctgtttaatgggtggccttatctggttgttgaggcacagcgctgtattataaccgcggccatgcacaatacatttaaccgccctgggtgggttcgctccattactcaatttacaactgatcagtccggtcgggtagataccacactgctcgcacgaacagaattcggccatattgatctaccactcgaaacagattccccaacggcattcagtgtttcacaccgccaaagtacgaatttgcccgtagagtacaccggtattccagtggaggtggtgaccgatcctaacatcttgatgggcatgcaaaccagcgtgcacattgcggagctagtgaaggcatgttacccgtcaccagaattagtgagcgctgtaggggtgcacgtgaattggctcaacgaagtcttgctccgagttgtccagaaggaatctcagttgcaagggaccgaggcctacaacgagtgccttgcgcttttaggtcgcattcaatgtgtcatgaagatggggccgtttgtctcggtagtgccgcagctgcaatacagaatgtatggtagcctcatcagacaaatggcccaggtagcacagaactacgaccaagatttcaggcagctcaagttattcattgcccaaaaccaaatccttggcagctatttgctgcagcagaacaaggcctttgctgacagagaggtgcagatggagagctttcattcagcggtcatttctcaaagaaggcaggagttggacgacgccatcgctaagatggaccgactgagcttgcagatggaggaagaggacagagcaatggagcaagcccgaaaagaaatggaagaaggattgaagcagttccagaatgagcaagttgcaagggctgtgttcgctgttcttaaatctgtagctatgattgcgctcgcattcgtcacggctggtgcaacggctcctggggctgcagcatctgcagcgcaagctgtgaacatagccggtcaagcggcacaagctctgcgaagggtggtggaaattctagagcagctggaggctgtgatggaggttgtggctgctgtgaaggacctcgtggattcattggaacaggtaggtcagattgtggacgcaccggtgatgccggaattgccctcagaggcggactggtccatttttgtgaacgaggtggaggccgtggcagagggcatgccaacggaagtctcggaggttccggcgtggaaggccaagtgcaagaatgtggctgcactgggtagggagatgagcatcacggcagaacagatttcccagctccagtatgacatctgggtgcaaggcttgttgcgggatatagctcaaagccacgcagaccggctggcagcgattcaacctgctaatcttaccaactatttggagatggcaatacagatggatatgcggactacgaggatactgatagggctcctcaacataatgcgcatccagaatgcggcacttatgtatgagtaccttctaacgcccacgcagctcactgcatggccgctgagaatggatactgtggccaacttgctcatcacgcacgagagtgctgcactgtcaggattagctcagttagggcccccatcggacttcacgagcaggcatgtagtgaaaggcatacctgtgagcttgcttctagacggtggggattgggaatttgagattcctgtgcaaggtggcatgtccagtttcccttccagctggactcgagtgcggattcggcacctggagatgcactttgtgaaggaggccagcggtattggtggtgagattatccaccagcctaccacccagacggggaccatttacatcctcctgcagggctccactgtcttccatgatcgcagaagggaggaggtgatgacctttcaggcagcggttccgctcaactaccattacgcgtaccgcctcgacaccggcgactccactctcacaaacgaaccctctgaacagtttgccaacaagttcatgcagatgacacccttcacccgttggaggcttcgtctgtctgcgtccgcaaaagagaatgcaggattagcctttcccacggctacagcacttgactccactacccagattgtcatcactttccatgttacggccatcagacaaattgactggcggcacgacgaagag

SEQ ID NO: 436 - DNA, 2556 bp, synthetic construct
  misc_feature 1..2556: note = PtIP-83 polypeptide variant encoding polynucleotide
  source 1..2556: mol_type = other DNA
atggattacagcacgctttacagggatctgaaccagataagcatgcccctggatcgggtagagttctcagaggtgatggtaatccacaggatgtacttgaggttatctgatctgaatgtgggggagctccccggagccgagagggtgaagcggttgtatgtgttggcagacgtggtggagctcgcaacatttgcgcatccacagttgcttaatacgcggatgccaggatcggtgacggtgatcattctgtgtcgtcttcttcagtttccaactgatgggtcgttcgctgcttggctcgagctgccgttcatggagttgcacacactcatagaacaatacaggtcagagataaaagcagcagatgacgcgaaatggggaacgtatgtacacgcggaggaagtacagctcagcccgctgtttaatgggtggccttatctggttgttgaggcacagcgctgtattataaccgcggccatgcacaatacatttaaccgccctgggtgggttcgctccattactcaatttacaactgatcagtccggtcgggtagataccacactgctcgcacgaacagaattcggccatattgatctaccactcgaaacagattccccaacggcattcagtgtttcacaccgccaaagtacgaatttgcccgtagagtacaccggtattccagtggaggtggtgaccgatcctaacatcttgctgggcatgcaaaccagcgtgcacattgcggagctagtgaaggcatgttacccgtcaccagaattagtgagcgctgtaggggtgcacgtgaattggctcaacaaactcttactcccacttaaggaatcgactcagttgcaaggaagcgagtcgtacaaggagtgccttgcactcttgggtcgtgttcacgctgcgatgaagatggtgagaattggcttagtagtgccccagctgcaatacagaatgtacggtagcctcatcaaccaaatggcccaagtagcacaaaactacgaccgagaattcaagcagctcaagttattcattgcccaaaaccaaatccttggcagctatttgctgcagcagaacagggcatttgctgagagggagctgcagatggagagctttcattcagcggtcatttctcaaagaaggcaggagttggacgacgccatcgctaagatggaccgactgagcttgcagatggaggaagaggacagagcaatggagcaagcccgaaaagaaatggaagaaggattgaagcagttccagaatgagcaagttgcaagggctgtgttcgctgttcttaaatctgtagctatgattgcgctcgcattcgtcacggctggtgcaacggctcctggggctgcagcatctgcagcgcaagctgtgaacatagccggtcaagcggcacaagctctgcgaagggtggtggaaattctagaggggctcgaggctgtgatggaggttgtggctgctataaagcaccttgtggatgctctggaccaggtaagtcagattgtggatgcaccacctatgccagacatgccctcggaggcggactggagtatttttgtgaatgagattgaagccgtggcagaggggatgccgacggaagtctcggaggttccggcgtggaaggccaagtgcaagaatgtggctgcactgggtagggagatgtgcatcacggcagaacagatttcccagctccagtatgacatctgggtgcaaggcttgttgcgggatatagctcaaagccacgcagaccggctggcagcgattcaacctgctaatcttaccaactatttggagatggcaatacagatggatatgcggactacgaggatactgatagggctcctcaacataatgcgcatccagaatgcggcacttatgtatgagtaccttctaacgcccacgcagctcactgcatggccgctgagaatggatactgtggccaacttgctcatcacgcacgagagtgctgcactgtcaggattagctcagttagggcccccatcggacttcacgagcaggcatgtagtgaaaggcatacctgtgagcttgcttctagacggtggggattgggaatttgagattcctgtgcaaggtggcatgtccagtttcccttccagctggactcgagtgcggattcggcacctggagatgcactttgtgcaggaggccagcggtattggtggtgagattatccaccagcctgccacccagactgggaccatttacatcctcctgcagggctccactgtcttccatgatcgcagaagggaggaggtgatgacctttcaggcagcggttccgctcaactaccattacgcgtaccgcctcgacactggagaagccactcttacgaacgagccctcggaacagtttgccaacacattcatgcagatgacaccgttcactcactggaggctacgtctgtctgcgtccgcagcggagaataaaggattagcctttcccacagctacagctcccgactccaccactgagattgccatcactttccatgttacggccattagacaaattgactggcggcaagaggaggag

SEQ ID NO: 437 - DNA, 2502 bp, synthetic construct
  misc_feature 1..2502: note = PtIP-83 polypeptide variant encoding polynucleotide
  source 1..2502: mol_type = other DNA
atggattacagcacgctttacagggatctgaaccagataagcatgcccctggatcgggtagagttctcagaggtgatggtaatccacaggatgtacttgaggttatctgatctgaatgtgggggagctccccggagccgagagggtgaagcggttgtatgtgttggcagacgtggtggagctcgcaacatttgcgcatccacagttgcttaatacgcggatgccaggatcggtgacggtgatcattctgtgtcgtcttcttcagtttccaactgatgggtcgttcgctgcttggctcgagctgccgttcatggagttgcacacactcatagaacaatacaggtcagagataaaagcagcagatgacgcgaaatggggaacgtatgtacacgcggaggaagtacagctcagcccgctgtttaatgggtggccttatctggttgttgaggcacagcgctgtattataaccgcggccatgcacaatacatttaaccgccctgggtgggttcgctccattactcaatttacaactgatcagtccggtcgggtagataccacactgctcgcacgaacagaattcggccatattgatctaccactcgaaacagattccccaacggcattcagtgtttcacaccgccaaagtacgaatttgcccgtagagtacaccggtattccagtggaggtggtgaccgatcctaacatcttgatgggcatgcaaaccagcgtgcacattgcggagctagtgaaggcatgttacccgtcaccagaattagtgagcgctgtaggggtgcacgtgaattggctcaacgaagtcttgctccgagttgtccagaaggaatctcagttgcaagggaccgaggcctacaacgagtgccttgcgcttttaggtcgcattcaatgtgtcatgaagatggggccgtttgtctcggtagtgccgcagctgcaatacagaatgtatggtagcctcatcagacaaatggcccaggtagcacagaactacgaccaagatttcaggcagctcaagttattcattgcccaaaaccaaatccttggcagctatttgctgcagcagaacaaggcctttgctgacagagaggtgcagatggagagctttcattcagcggtcatttctcaaagaaggcaggagttggacgacgccatcgctaagatggaccgactgagcttgcagatggaggaagaggacagagcaatggagcaagcccgaaaagaaatggaagaaggattgaagcagttccagaatgagcaagttgcaagggctatgttcacagcttgcgctgcagatgctgcagcgcaagctgtgagcatagcaggtcaggcggcgcaaggtctgcgaagggtggtggaaattctagagcagctggaggctgtgatggaggttgtggctgctataaagcaccttgtggatgctctggaccaggtaagtcagattgtggacgcaccggtgatgccggaattgccctcagaggcggactggtccatttttgtgaacgaggtggaggccgtggcagagggcatgccaacggaagtctcggaggttccggtgtggagggccaagtgcaagaatgtggctgcactgggtagggagatgtgcatcacggcagaacagatttcccagctccagtatgacatctgggtgcaaggcttgttgcgggatatagctcaaagccacgcagaccggctggcagcgattcaacctgctaatcttaccaactatttggagatggcaatacagatggatatgcggactacgaggatactgatagggctcctcaacataatgcgcatccagaatgcggcacttatgtatgagtaccttctaacgcccacggagctcacaacatggccactgggtatggataccgtgggtgacttgctcatcgcgcaggagaatgctgcactgataggattaatgcagctagggccctcatctgatttcacgagcaggcatgtggtgaaagacatacctgtgaacttgctgctcgatggcgaggattgggagtttgagattcctgtgcaagctggcatgtccagcttcccttccagctggtctcgcgtccgtattcggcacctggagatgcactttgtgaaggaggccagcggtattggtggtgagattatccaccagcctaccacccagactgggaccgtttacatccttctgcagggttccactatcttccatgaccgcagaagagaccaggtgttgccttttcaggccgctgctccgctcaactaccattacgcgtaccgcctcgacactggagaagccactcttacgaacgagccctcggaacagtttgccaacacattcatgcagatgacaccgttcactcactggaggctacgtctgtctgcgtccgcagcggagaataaaggattagcctttcccacagctacagctcccgactccaccactgagattgccatcactttccatgttacggccattagacaaattgactggcggcaagaggaggag

SEQ ID NO: 438 - DNA, 2559 bp, synthetic construct
  misc_feature 1..2559: note = PtIP-83 polypeptide variant encoding polynucleotide
  source 1..2559: mol_type = other DNA
atggattacagcacgctttacagggatctgaaccagataagcatgcccctggatcgggtagagttctcagaggtgatggtaatccacaggatgtacttgaggttatctgatctgaatgtgggggagctccccggagccgagagggtgaagcggttgtatgtgttggcagacgtggtggagctcgcaacatttgcgcatccacagttgcttaatacgcggatgccaggatcggtgacggtgatcattctgtgtcgtcttcttcagtttccaactgatgggtcgttcgctgcttggctcgagctgccgttcatggagttgcacacactcatagaacaatacaggtcagagataaaagcagcagatgacgcgaaatggggaacgtatgtacacgcagaggaagtacagctcagcccgctgtttaatgggtggccttatctggttgttgaggcacagcgctgtattataaccgcggccatgcacaatacatttaaccgccctgggtgggttcgctccattactcaatttacaactgatcagtccggtcgggtagataccacactgctcgcacgaacagaattcggccatattgatctaccactcgaaacagattccccaacggcattcagtgtttcacaccgccaaagtacgaatttgcccgtagagtacaccggtattccagtggaggtggtgaccgatcctaacatcttgatgggcatgcaaaccagcgtgcacattgcggagctagtgaaggcatgttacccgtcaccagaattagtgagcgctgtaggggtgcacgtgaattggctcaacgaagtcttgctccgagttgtccagaaggaatctcagttgcaagggaccgaggcctacaacgagtgccttgcgcttttaggtcgcattcaatgtgtcatgaagatggtgagaattggcttagtagtgccccagctgcaatacagaatgtacggtagcctcatcaaccaaatggcccaagtagcacaaaactacgaccgagaattcaagcaattcaaattattcatcatccaaaatcaaatccttggcagctatttgctgcagcagaacagggcatttgctgagagggagctgcagatggagagctttcatgctgctgtcatttctcaaagaagggaggagttggacaatacattcgcaaagatggaccgattgagcgggcaaatggaggcagagagtagtgcaatggagcaagccaaaaaggaaatggacgaaggattgaggcagttccagaataggcaagttgcgaacgccctctttgccgttcttagcgctgtagctcagattgggcttgcattccttacggctggtgcaacggctcctggggctgtggcgtcggcggggcaagctgtgagcatagcaggtcaggcggcgcaaggtctgcgaagggtggtggaaattctagagcagctggaggctgtgatggaggttgtggctgctgtgaaggacctcgtggattcattggaacaggtaggtcagattgtggacgcaccggtgatgccggaattgccctcagaggcggactggagtatttttgtgaatgagattgaagccgtggcagaggggatgccgacggaagtctcggaggttccggcgtggaaggccaagtgcaagaatgtggctgcactgggtagggagatgtgcatcacggcagaacagatttcccagctccagtatgacatctgggtgcaaggcttgttgcgggatatagctcaaagccacgcagaccggctggcagcgattcaacctgctaatcttaccaactatttggagatggcaatacagatggatatgcggactacgaggatactgatagggctcctcaacataatgcgcatccagaatgcggcacttatgtatgagtaccttctaacgcccacggagctcacaacatggccactgggtatggataccgtgggtgacttgctcatcgcgcaggagaatgctgcactgataggattaatgcagctagggccctcatctgatttcacgagcaggcatgtggtgaaagacatacctgtgaacttgctgctcgatggcgaggattgggagtttgagattcctgtgcaagctggcatgtccagcttcccttccagctggtctcgcgtccgtattcggcacctggagatgcactttgtgaaggaggccagcggtattggtggtgagattatccaccagcctaccacccagactgggaccgtttacatccttctgcagggttccactatcttccatgaccgcagaagagaccaggtgttgccttttcaggccgctgctccgctcaactaccattacgcgtaccgcctcgacaccggcgactccactctcacaaacgaaccctctgaacagtttgccaacaagttcatgcagatgacacccttcacccgttggaggcttcgtctgtctgcgtccgcaaaagagaatgcaggattagcctttcccacggctacagcacttgactccactacccagattgtcatcactttccatgttacggccatcagacaaattgactggcggcacgacgaagag

SEQ ID NO: 439 - DNA, 2559 bp, synthetic construct
  misc_feature 1..2559: note = PtIP-83 polypeptide variant encoding polynucleotide
  source 1..2559: mol_type = other DNA
atggattacagcacgctttacagggatctgaaccagataagcatgcccctggatcgggtagagttctcagaggtgatggtaatccacaggatgtacttgaggttatctgatctgaatgtgggggagctccccggagccgagaaagtgaagcggttgtatgtgttggcagacgtggtggagctcgcaacatttgcgcatccacagttgcttaatacgcggatgccaggatcggtgacggtgatcattctgtgtcgtcttcttcagtttccaactgatgggtcgttcgctgcttggctcgagctgccgttcatggagttgcacacactcatagaacaatacaggtcagagataaaagcagcagatgacgcgaaatggggaacgtatgtacacgcggaggaagtacagctcagcccgctgtttaatgggtggccttatctggttgttgaggcacagcgctgtattataaccgcggccatgcacaatacatttaaccgccctgggtgggttcgctccattactcaatttacaactgatcagtccggtcgggtagataccacactgctcgcacgaacagaattcggccatattgatctaccactcgaaacagattccccaacggcattcagtgtttcacaccgccaaagtacgaatttgcccgtagagtacaccggtattccagtggaggtggtgaccgatcctaacatcttgatgggcatgcaaaccagcgtgcacattgcggagctagtgaaggcatgttacccgtcaccagaattagtgagcgctgtaggggtgcacgtgaattggctcaacgaagtcttgctccgagttgtccagaaggaatctcagttgcaagggaccgaggcctacaacgagtgccttgcgcttttaggtcgcattcaatgtgtcatgaagatggggccgtttgtctcggtagtgccgcagctgcaatacagaatgtatggtagcctcatcagacaaatggcccaggtagcacagaactacgaccaagatttcaggcagctcaagttattcattgcccaaaaccaaatccttggcagctatttgctgcagcagaacagggcatttgctgagagggagctgcagatggagagctttcatgctgctgtcatttctcaaagaagggaggagttggacaatacattcgcaaagatggaccgattgagcgggcaaatggaggcagagagtagtgcaatggagcaagccaaaaaggaaatggacgaaggattgaggcagttccagaataggcaagttgcgaacgccctctttgccgttcttagcgctgtagctcagattgggcttgcattccttacggctggtgcaacggctcctggagctgtggcgtcggcggggcaagctgtgagcatagcaggtcaggcggcgcaaggtctgcgaagggtggtggaaattctagagcagctggaggctgtgatggaggttgtggctgctgtgaaggacctcgtggattcattggaacaggtaggtcagattgtggacgcaccggtgatgccggaattgccctcagaggcggactggtccatttttgtgaacgaggtggaggccgtggcagagggcatgccaacggaagtctcggaggttccggtgtggagggccaagtgcaagaatgtggctgcactgggtagggagatgtgcatcacggcagaacagatttcccagctccagtatgacatctgggtgcaaggcttgttgcgggatatagctcaaagccacgcagaccggctggccgcaattcaacccgcggaccttaccaactatttggagatggctacccagatggatatgcggactacgaggatgctgctggggctcctcaacatattgcgcatccagaatgcggcgctcaggtacgagtatcttctaatgcccacggagctcacaacatggccactgggtatggataccgtgggtgacttgctcatcgcgcaggagaatgctgcactgataggattaatgcagctagggccctcatctgatttcacgagcaggcatgtggtgaaagacatacctgtgaacttgctgctcgatggcgaggattgggagtttgagattcctgtgcaagctggcatgtccagcttcccttccagctggtctcgcgtccgtattcggcacctggagatgcactttgtgaaggaggccagcggtattggtggtgagattatccaccagcctaccacccagactgggaccgtttacatccttctgcagggttccactatcttccatgaccgcagaagagaccaggtgttgccttttcaggccgctgctccgctcaactaccattacgcgtaccgcctcgacaccggcgactccactctcacaaacgaaccctctgaacagtttgccaacaagttcatgcagatgacacccttcacccgttggaggcttcgtctgtctgcgtccgcagcggagaataaaggattagcctttcccacagctacagctcccgactccaccactgagattgccatcactttccatgttacggccattagacaaattgactggcggcaagaggaggag

SEQ ID NO: 440 - DNA, 2559 bp, synthetic construct
  misc_feature 1..2559: note = PtIP-83 polypeptide variant encoding polynucleotide
  source 1..2559: mol_type = other DNA
atggattacagcacgctttacagggatctgaaccagataagcatgcccctggatcgggtagagttctcagaggtgatggtaatccacaggatgtacttgaggttatctgatctgaatgtgggggagctccccggagccgagagggtgaagcggttgtatgtgttggcagacgtggtggagctcgcaacatttgcgcatccacagttgcttaatacgcggatgccaggatcggtgacggtgatcatattgtgtcgtcttcttcagtttccaactgatgggtcgttcgctgcttggctcgagctgccgttcatggagttgcacacactcatagaacaatacaggtcagagataaaagcagcagatgacgcgaaatggggaacgtatgtacacgcggaggaagtacagctcagcccgctgtttaatgggtggccttatctggttgttgaggcacagcgctgtattataaccgcggccatgcacaatacatttaaccgccctgggtgggttcgctccattactcaatttacaactgatcagtccggtcgggtagataccacactgctcgcacgaacagaattcggccatattgatctaccactcgaaacagattccccaacggcattcagtgtttcacaccgccaaagtacgaatttgcccgtagagtacaccggtattccagtggaggtggtgaccgatcctaacatcttgatgggcatgcaaaccagcgtgcacattgcggagctagtgaaggcatgttacccgtcaccagaattagtgagcgctgtaggggagcacgtgaattggctcaacgaagtcttgctccgagttgtccagaaggaatctcagttgcaagggaccgaggcctacaacgagtgccttgcgcttttaggtcgcattcaatgtgtcatgaagatggggccgtttgtctcggtagtgccgcagctgcaatacagaatgtacggtagcctcatcaaccaaatggcccaagtagcacaaaactacgaccgagaattcaagcaattcaaattattcatcatccaaaatcaaatccttggcagctatttgctgcagcagaacagggcatttgctgagagggagctgcagatggagagctttcatgctgctgtcatttctcaaagaagggaggagttggacaatacattcgcaaagatggaccgattgagcgggcaaatggaggcagagagtagtgcaatggagcaagccaaaaaggaaatggacgaaggattgaggcagttccagaataggcaagttgcgaacgccctctttgccgttcttagcgctgtagctcagattgggcttgcattccttacggctggtgcaacggctcctggagctgtggcgtcggcggggcaagctgtgagcatagcaggtcaggcggcgcaaggtctgcgaagggtggtggaaattctagaggggctcgaggctgtgatggaggttgtggctgctgtgaaggacctcgtggattcattggaacaggtaggtcagattgtggacgcaccggtgatgccggaattgccctcagaggcggactggtccatttttgtgaacgaggtggaggccgtggcagagggcatgccaacggaagtctcggaggttccggtgtggagggccaagtgcaagaatgtggctgcactgggtagggagatgtgcatcacggcagaacagatttcccagctccagtatgacatctgggtgcaaggcttgttgcgggatatagctcaaagccacgcagaccggctggcagcgattcaacctgctaatcttaccaactatttggagatggctacccagatggatatgcggactacgaggatgctgctggggctcctcaacatattgcgcatccagaatgcggcgctcaggtacgagtatcttctaatgcccacggagctcacaacatggccactgggtatggataccgtgggtgacttgctcatcgcgcaggagaatgctgcactgataggattaatgcagctagggccctcatctgatttcacgagcaggcatgtggtgaaagacatacctgtgaacttgctgctcgatggcgaggattgggagtttgagattcctgtgcaagctggcatgtccagcttcccttccagctggtctcgcgtccgtattcggcacctggagatgcactttgtgaaggaggccagcggtattggtggtgagattatccaccagcctaccacccagactgggaccgtttacatccttctgcagggttccactatcttccatgaccgcagaagagaccaggtgttgccttttcaggccgctgctccgctcaactaccattacgcgtaccgcctcgacaccggcgactccactctcacaaacgaaccctctgaacagtttgccaacaagttcatgcagatgacacccttcacccgttggaggcttcgtctgtctgcgtccgcaaaagagaatgcaggattagcctttcccacggctacagcacttgactccactacccagattgtcatcactttccatgttacggccatcagacaaattgactggcggcacgacgaagag

SEQ ID NO: 441 - DNA, 2559 bp, synthetic construct
  misc_feature 1..2559: note = PtIP-83 polypeptide variant encoding polynucleotide
  source 1..2559: mol_type = other DNA
atggattacagcacgctttacagggatctgaaccagataagcatgcccctggatcgggtagagttctcagaggtgatggtaatccacaggatgtacttgaggttatctgatctgaatgtgggggagctccccggagccgagagggtgaagcggttgtatgtgttggcagacgtggtggagctcgcaacatttgcgcatccacagttgcttaatacgcggatgccaggatcggtgacggtgatcattctgtgtcgtcttcttcagtttccaactgatgggtcgttcgctgcttggctcgagctgccgttcatggagttgcacacactcatagaacaatacaggtcagagataaaagcagcagatgacgcgaaatggggaacgtatgtacacgcggaggaagtacagctcagcccgctgtttaatgggtggccttatctggttgttgaggcacagcgctgtattataaccgcggccatgcacaatacatttaaccgccctgggtgggttcgctccattactcaatttacaactgatcagtccggtcgggtagataccacactgctcgcacgaacagaattcggccatattgatctaccactcgaaacagattccccaacggcattcagtgtttcacaccgccaaagtacgaatttgcccgtagagtacaccggtattccagtggaggtggtgaccgatcctaacatcttgatgggcatgcaaaccagcgtgcacattgcggagctagtgaaggcatgttacccgtcaccagaattagtgagcgctgtaggggtgcacgtgaattggctcaacgaagtcttgctccgagttgtccagaaggaatctcagttgcaagggaccgaggcctacaacgagtgccttgcgcttttaggtcgcattcaatgtgtcatgaagatggggccgtttgtctcggtagtgccgcagctgcaatacagaatgtatggtagcctcatcagacaaatggcccaggtagcacagaactacgaccaagatttcaggcagctcaagttattcattgcccaaaaccaaatccttggcagctatttgctgcagcagaacaaggcctttgctgacagagaggtgcagatggagagctttcattcagcggtcatttctcaaagaaggcaggagttggacgacgccatcgctaagatggaccgactgagcttgcagatggaggaagaggacagagcaatggagcaagcccgaaaagaaatggaagaaggattgaagcagttccagaatgagcaagttgcaagggctgtgttcgctgttcttaaatctgtagctatgattgcgctcgcattcgtcacggctggtgcaacggctcctggggctgcagcatctgcagcgcaagctgtgaacatagccggtcaagcggcacaagctctgcgaagggtggtggaaattctagaggggctcgaggctgtgatggaggttgtggctgctgtgaaggacctcgtggattcattggaacaggtaggtcagattgtggacgcaccggtgatgccggaattgccctcagaggcggactggtccatttttgtgaacgaggtggaggccgtggcagagggcatgccaacggaagtctcggaggttccggtgtggaaggccaagtgcaagaatgtggctgcactgggtcgggagatgagcatcacggcagtacagatgtcggagctgcagtatgacatctgggtgcaaggcatgatgcgggatatggctcgaagccaggcagacaggctggccgcaattcaacccgcggaccttaccaactatttggagatggctacccagatggatatgcggactacgaggatgctgctggggctcctcaacatattgcgcatccagaatgcggcgctcaggtacgagtatcttctaatgcccacggagctcacaacatggccactgggtatggataccgtgggtgacttgctcatcgcgcaggagaatgctgcactgataggattaatgcagctagggccctcatctgatttcacgagcaggcatgtggtgaaagacatacctgtgaacttgctgctcgatggcgaggattgggagtttgagattcctgtgcaagctggcatgtccagcttcccttccagctggtctcgcgtccgtattcggcacctggagatgcactttgtgaaggaggccagcggtattggtggtgagattatccaccagcctaccacccagactgggaccgtttacatccttctgcagggttccactatcttccatgaccgcagaagagaccaggtgttgccttttcaggccgctgctccgctcaactaccattacgcgtaccgcctcgacactggagaagccactcttacgaacgagccctcggaacagtttgccaacacattcatgcagatgacaccgttcactcactggaggcttcgtctgtctgcgtccgcagcggagaataaaggattagcctttcccacagctacagctcccgactccaccactgagattgccatcactttccatgttacggccattagacaaattgactggcggcaagaggaggag

SEQ ID NO: 442 - DNA, 2559 bp, synthetic construct
  misc_feature 1..2559: note = PtIP-83 polypeptide variant encoding polynucleotide
  source 1..2559: mol_type = other DNA
atggattacagcacgctttacagggatctgaaccagataagcatgcccctggatcgggtagagttctcagaggtgatggtaatccacaggatgtacttgaggttatctgatctgaatgtggggcagctcgagggagccgagagggtgaagcggttgtatgtgtttgcggacgtggtggagctcgcaacatttgcgcatccacagttgcttaatacgcggatgccaggatcggtgacggtgatcattctgtgtcgtcttcttcagtttccaactgatgggtcgttcgctgcttggctcgagctgccgttcatggagttgcacacactcatagaacaatacaggtcagagataaaagcagcagatgacgcgaaatggggaacgtatgtacacgcggaggaagtacagctcagcccgctgtttaatgggtggccttatctggttgttgaggcacagcgctgtattataaccgcggccatgcacaatacatttaaccgccctgggtgggttcgctccattactcaatttacaactgatcagtccggtcgggtagataccacactgctcgcacgaacagaattcggccatattgatctaccactcgaaacagattccccaacggcattcagtgtttcacaccgccaaagtacgaatttgcccgtagagtacaccggtattccagtggaggtggtgaccgatcctaacatcttgatgggcatgcaaaccagcgtgcacattgcggagctagtgaaggcatgttacccgtcaccagaattagtgagcgctgtaggggtgcacgtgaattggctcaacgaagtcttgctccgagttgtccagaaggaatctcagttgcaagggaccgaggcctacaacgagtgccttgcgcttttaggtcgcattcaatgtgtcatgaagatggggccgtttgtctcggtagtgccgcagctgcaatacagaatgtatggtagcctcatcaaccaaatggcccaagtagcacaaaactacgaccgagaattcaagcaattcaaattattcatcatccaaaatcaaatccttggcagctatttgctgcagcagaacagggcctttgctgacagagaggtgcagatggagagctttcattcagcggtcatttctcaaagaaggcaggagttggacgacgccatcgctaagatggaccgactgagcttgcagatggaggaagaggacagagcaatggagcaagcccgaaaagaaatggaagaaggattgaagcagttccagaatgagcaagttgcaagggctgtgttcgctgttcttagcgctgtagctcagattgggcttgcattccttacggctggtgcaacggctcctggagctgtggcgtcggcggggcaagctgtgagcatagcaggtcaggcggcgcaaggtctgcgaagggtggtggaaattctagaggggctcgaggctgtgatggaggttgtggctgctataaagcaccttgtggatgctctggaccaggtaagtcagattgtggatgcaccacctatgccagacatgccctcggaggcggactggtccatttttgtgaatgagattgaagccgtggcagaggggatgccgacggaagtctcggaggttccggcgtggaaggccaagtgcaagaatgtggctgcactgggtagggagatgtgcatcacggcagaacagatttcccagctccagtatgacatctgggtgcaaggcttgttgcgggatatagctcaaagccacgcagaccggctggcagcgattcaacctgctaatcttaccaactatttggagatggcaatacagatggatatgcggactacgaggatactgatagggctcctcaacataatgcgcatccagaatgcggcacttatgtatgagtaccttctaacgcccacgcagctcactgcatggccgctgagaatggatactgtggccaacttgctcatcacgcacgagagtgctgcactgtcaggattagctcagttagggcccccatcggacttcacgagcaggcatgtagtgaaaggcatacctgtgagcttgcttctagacggtggggattgggaatttgagattcctgtgcaagctggcatgtccagcttcccttccagctggtctcgcgtccgtattcggcacctggagatgcactttgtgaaggaggccagcggtattggtggtgagattatccaccagcctgccacccagacggggaccgtttacatccttctgcagggttccactatcttccatgaccgcagaagagaccaggtgttgccttttcaggccgctgctccgctcaactaccattacgcgtaccgcctcgacaccggcgactccactctcacaaacgaaccctctgaacagtttgccaacaagttcatgcagatgacacccttcacccgttggaggcttcgtctgtctgcgtccgcaaaagagaatgcaggattagcctttcccacggctacagcacttgactccactacccagattgtcatcactttccatgttacggccatcagacaaattgactggcggcacgacgaagag

SEQ ID NO: 443 - DNA, 2556 bp, synthetic construct
  misc_feature 1..2556: note = PtIP-83 polypeptide variant encoding polynucleotide
  source 1..2556: mol_type = other DNA
atggattacagcacgctttacagggatctgaaccagataagcatgcccctggatcgggtagagttctcagaggtgatggtgatccacaggatgtacttgaggttatctgatctgaatgtgggggagctccccggagccgagagggtgaagcggttgtatgtgttggcagacgtggtggagctcgcaacatttgcgcatccacagttgcttaatacgcggatgccaggatcggtgacggtgatcattctgtgtcgtcttcttcagtttccaactgatgggtcgttcgctgcttggctcgagctgccgttcatggagttgcacacactcatagaacaatacaggtcagagataaccgcagcagatgacgcgaaatggggaacgtatgtacacgcggaggaagtacagctcagcccgctgtttaatgggtggccttatctggttgttgaggcacagcgctgtattataaccgcggccatgcacaatacatttaaccgccctgggtgggttcgctccattactcaatttacaactgatcagtccggtcgggtagataccacactgctcgcacgaacagaattcggccatattgatctaccactcgaaacagattccccaacggcattcagtgtttcacaccgccaaagtacgaatttgcccgtagagtacaccggtattccagtggaggtggtgaccgatcctaacatcttgatgggcatgcaaaccagcgtgcacattgcggagctagtgaaggcatgttacccgtcaccagaattagtgagcgctgtaggggagcacgtgaattggctcaacgaagtcttgctccgagttgtccagaaggaatctcagttgcaagggaccgaggcctacaacgagtgccttgcgcttttaggtcgcattcaatgtgtcatgaagatggggccgtttgtctcggtagtgccgcagctgcaatacagaatgtatggtagcctcatcagacaaatggcccaggtagcacagaactacgaccaagatttcaggcagctcaagttattcattgcccaaaaccaaatccttggcagctatttgctgcagcagaacaaggcctttgctgacagagaggtgcagatggagagctttcattcagcggtcatttctcaaagaaggcaggagttggacgacgccatcgctaagatggaccgactgagcttgcagatggaggaagaggacagagcaatggagcaagcccgaaaagaaatggaagaaggattgaagcagttccagaatgagcaagttgcaagggctgtgttcgctgttcttaaatctgtagctatgattgcgctcgcattcgtcacggctggtgcaacggctcctggggctgcagcatctgcagcgcaagctgtgaacatagccggtcaagcggcacaagctctgcgaagggtggtggaaattctagaggggctcgaggctgtgatggaggttgtggctgctataaagcaccttgtggatgctctggaccaggtaagtcagattgtggatgcaccacctatgccagacatgccctcggaggcggactggagtatttttgtgaatgagattgaagccgtggcagaggggatgccgacggaagtctcggaggttccggtgtggagggccaagtgcaagaatgtggctgcactgggtagggagatgagcatcacggcagtacagatgtcggagctgcagtatgacatctgggtgcaaggcatgatgcgggatatggctcgaagccaggcagacaggctggccgcaattcaacccgcggaccttaccaactatttggagatggctacccagatggatatgcggactacgaggatgctgctggggctcctcaacataatgcgcatccagaatgcggcacttatgtatgagtaccttctaacgcccacgcagctcactgcatggccgctgagaatggatactgtggccaacttgctcatcacgcacgagagtgctgcactgtcaggattagctcagttagggcccccatcggacttcacgagcaggcatgtagtgaaaggcatacctgtgagcttgcttctagacggtggggattgggaatttgagattcctgtgcaaggtggcatgtccagtttcccttccagctggactcgagtgcggattcggcacctggagatgcactttgtgcaggaggcgagcggtggcggcgagattatccaccagcctgccacccagacggggaccatttacatcctcctgcagggctccactgtcttccatgatcgcagaagggaggaggtgatgacctttcaggcagcggttccgctcaactaccattacgcgtaccgcctcgacactggagaagccactcttacgaacgagccctcggaacagtttgccaacacattcatgcagatgacaccgttcactcactggaggctacgtctgtctgcgtccgcagcggagaataaaggattagcctttcccacagctacagctcccgactccaccactgagattgccatcactttccatgttacggccattagacaaattgactggcggcaagaggaggag

SEQ ID NO: 444 - DNA, 2556 bp, synthetic construct; identical to SEQ ID NO: 431
  misc_feature 1..2556: note = PtIP-83 polypeptide variant encoding polynucleotide
  source 1..2556: mol_type = other DNA

SEQ ID NO: 445 - DNA, 2556 bp, synthetic construct
  misc_feature 1..2556: note = PtIP-83 polypeptide variant encoding polynucleotide
  source 1..2556: mol_type = other DNA
atggattacagcacgctttacagggatctgaaccagataagcatgcccctggatcgggtagagttctcagaggtgatggtaatccacaggatgtacttgaggttatctgatctgaatgtgggggagctccccggagccgagagggtgaagcggttgtatgtgtttgcggacgtggtggagctcgcaacatttgcgcatccacagttgcttaatacgcggatgccaggatcggtgacggtgatcattctgtgtcgtcttcttcagtttccaactgatgggtcgttcgctgcttggctcgagctgccgttcatggagttgcacacactcatagaacaatacaggtcagagataaaagcagcagatgacgcgaaatggggaacgtatgtacacgcggaggaagtacagctcagcccgctgtttaatgggtggccttatctggttgttgaggcacagcgctgtattataaccgcggccatgcacaatacatttaaccgccctgggtgggttcgctccattactcaatttacaactgatcagtccggtcgggtagataccacactgctcgcacgaacagaattcggccatattgatctaccactcgaaacagattccccaacggcattcagtgtttcacaccgccaaagtacgaatttgcccgtagagtacaccggtattccagtggaggtggtgaccgatcctaacatcttgatgggcatgcaaaccagcgtgcacattgcggagctagtgaaggcatgttacccgtcaccagaattagtgagcgctgtaggggtgcacgtgaattggctcaacgaagtcttgctccgagttgtccagaaggaatctcagttgcaagggaccgaggcctacaacgagtgccttgcgcttttaggtcgcattcaatgtgtcatgaagatggggccgtttgtctcggtagtgccgcagctgcaatacagaatgtatggtagcctcatcagacaaatggcccaggtagcacagaactacgaccaagatttcaggcagctcaagttattcattgcccaaaaccaaatccttggcagctatttgctgcagcagaacaaggcctttgctgacagagaggtgcagatggagagctttcattcagcggtcatttctcaaagaaggcaggagttggacgacgccatcgctaagatggaccgactgagcttgcagatggaggaagaggacagagcaatggagcaagcccgaaaagaaatggaagaaggattgaagcagttccagaatgagcaagttgcaagggctgtgttcgctgttcttaaatctgtagctatgattgcgctcgcattcgtcacggctggtgcaacggctcctggggctgcagcatctgcagcgcaagctgtgaacatagccggtcaagcggcacaagctctgcgaagggtggtggaaattctagaggggctcgaggctgtgatggaggttgtggctgctataaagcaccttgtggatgctctggaccaggtaagtcagattgtggatgcaccacctatgccagacatgccctcggaggcggactggagtatttttgtgaatgagattgaagccgtggcagaggggatgccgacggaagtctcggaggttccggcgtggaaggccaagtgcaagaatgtggctgcactgggtcgggagatgagcatcacggcagtacagatgtcggagctgcagtatgacatctgggtgcaaggcatgatgcgggatatggctcgaagccaggcagacaggctggccgcaattcaacccgcggaccttaccaactatttggagatggctacccagatggatatgcggactacgaggatgctgctggggctcctcaacataatgcgcatccagaatgcggcacttatgtatgagtaccttctaacgcccacgcagctcactgcatggccgctgagaatggatactgtggccaacttgctcatcacgcacgagagtgctgcactgtcaggattagctcagttagggcccccatcggacttcacgagcaggcatgtagtgaaaggcatacctgtgagcttgcttctagacggtggggattgggaatttgagattcctgtgcaaggtggcatgtccagtttcccttccagctggactcgagtgcggattcggcacctggagatgcactttgtgcaggaggcgagcggtggcggcgagattatccaccagcctgccacccagacggggaccatttacatcctcctgcagggctccactgtcttccatgatcgcagaagggaggaggtgatgacctttcaggcagcggttccgctcaactaccattacgcgtaccgcctcgacactggagaagccactcttacgaacgagccctcggaacagtttgccaacaagttcatgcagatgacacccttcacccgttggaggcttcgtctgtctgcgtccgcaaaagagaatgtaggattagcctttcccacggctacagcacttgactccaccactgagattgccatcactttccatgttacggccattagacaaattgactggcggcaagaggaggag

SEQ ID NO: 446 - DNA, 2559 bp, synthetic construct
  misc_feature 1..2559: note = PtIP-83 polypeptide variant encoding polynucleotide
  source 1..2559: mol_type = other DNA
atggattacagcacgctttacagggatctgaaccagataagcatgcccctggatcgggtagagttctcagaggtgatggtaatccacaggatgtacttgaggttatctgatctgaatgtgggggagctccccggagccgagagggtgaagcggttgtatgtgttggcagacgtggtggagctcgcaacatttgcgcatccacagttgcttaatacgcggatgccaggatcggtgacggtgatcattctgtgtcgtcttcttcagtttccaactgatgggtcgttcgctgcttggctcgagctgccgttcatggagttgcacacactcatagaacaatacaggtcagagataaaagcagcagatgacgcgaaatggggaacgtatgtacacgcggaggaagtacagctcagcccgctgtttaatgggtggccttatctggttgttgaggcacagcgctgtattataaccgcggccatgcacaatacatttaaccgccctgggtgggttcgctccattactcaatttacaactgatcagtccggtcgggtagataccacactgctcgcacgaacagaattcggccatattgatctaccactcgaaacagattccccaacggcattcagtgtttcacaccgccaaagtacgaatttgcccgtagagtacaccggtattccagtggaggtggtgaccgatcctaacatcttgatgggcatgcaaaccagcgtgcacattgcggagctagtgaaggcatgttacccgtcaccagaattagtgagcgctgtaggggagcacctgaactggctcaacgaagtcttgctccgagttgtccagaaggaatctcagttgcaagggaccgaggcctacaacgagtgccttgcgcttttaggtcgcattcaatgtgtcatgaagatggggccgtttgtctcggtagtgccgcagctgcaatacagaatgtatggtagcctcatcagacaaatggcccaggtagcacagaactacgaccaagatttcaggcagctcaagttattcattgcccaaaaccaaatccttggcagctatttgctgcagcagaacaaggcctttgctgacagagaggtgcagatggagagctttcattcagcggtcatttctcaaagaaggcaggagttggacgacgccatcgctaagatggaccgactgagcttgcagatggaggaagaggacagagcaatggagcaagcccgaaaagaaatggaagaaggattgaagcagttccagaatgagcaagttgcaagggctgtgttcgctgttcttaaatctgtagctatgattgcgctcgcattcgtcacggctggtgcaacggctcctggggctgcagcatctgcagcgcaagctgtgaacatagccggtcaagcggcacaagctctgcgaagggtggtggaaattctagaggggctcgaggctgtgatggaggttgtggctgctgtgaaggacctcgtggattcattggaacaggtaggtcagattgtggacgcaccggtgatgccggaattgccctcagaggcggactggtccatttttgtgaacgaggtggaggccgtggcagagggcatgccaacggaagtctcggaggttccggtgtggagggccaagtgcaagaatgtggctgcactgggtcgggagatgagcatcacggcagtacagatgtcggagctgcagtatgacatctgggtgcaaggcatgatgcgggatatggctcgaagccaggcagacaggctggccgcaattcaacccgcggaccttaccaactatttggagatggctacccagatggatatgcggactacgaggatgctgctggggctcctcaacatattgcgcatccagaatgcggcgctcaggtacgagtatcttctaatgcccacggagctcacaacatggccactgggtatggataccgtgggtgacttgctcatcgcgcaggagaatgctgcactgataggattaatgcagctagggccctcatctgatttcacgagcaggcatgtggtgaaagacatacctgtgaacttgctgctcgatggcgaggattgggagtttgagattcctgtgcaagctggcatgtccagcttcccttccagctggtctcgcgtccgtattcggcacctggagatgcactttgtgaaggaggccagcggtattggtggtgagattatccaccagcctaccacccagacggggaccatttacatcctcctgcagggctccactgtcttccatgatcgcagaagggaggaggtgatgacctttcaggcagcggttccgctcaactaccattacgcgtaccgcctcgacactggagaagccactcttacgaacgagccctcggaacagtttgccaacacattcatgcagatgacaccgttcactcactggaggctacgtctgtctgcgtccgcagcggagaataaaggattagcctttcccacagctacagctcccgactccaccactgagattgccatcactttccatgttacggccattagacaaattgactggcggcaagaggaggag

SEQ ID NO: 447 - DNA, 2556 bp, synthetic construct
  misc_feature 1..2556: note = PtIP-83 polypeptide variant encoding polynucleotide
  source 1..2556: mol_type = other DNA
atggattacagcacgctttacagggatctgaaccagataagcatgcccctggatcgggtagagttctcagaggtgatggtaatccacaggatgtacttgaggttatctgatctgaatgtgggggagctccccggagccgagagggtgaagcggttgtatgtgttggcagacgtggtggagctcgcaacatttgcgcatccacagttgcttaatacgcggatgccaggatcggtgacggtgatcattctgtgtcgtcttcttcagtttccaactgatgggtcgttcgctgcttggctcgagctgccgttcatggagttgcacacactcatagaacaatacaggtcagagataaaagcagcagatgacgcgaaatggggaacgtatgtacacgcggaggaagtacagctcagcccgctgtttaatgggtggccttatctggttgttgaggcacagcgctgtattataaccgcggccatgcacaatacatttaaccgccctgggtgggttcgctccattactcaatttacaactgatcagtccggtcgggtagataccacactgctcgcacgaacagaattcggccatattgatctaccactcgaaacagattccccaacggcattcagtgtttcacaccgccaaagtacgaatttgcccgtagagtacaccggtattccagtggaggtggtgaccgatcctaacatcttgatgggcatgcaaaccagcgtgcacattgcggagctagtgaaggcatgttacccgtcaccagaattagtgagcgctgtaggggtgcacgtgaattggctcaacgaagtcttgctccgagttgtccagaaggaatctcagttgcaagggaccgaggcctacaacgagtgccttgcgcttttaggtcgcattcaatgtgtcatgaagatggggccgtttgtctcggtagtgccgcagctgcaatacagaatgtatggtagcctcatcagacaaatggcccaggtagcacagaactacgaccaagatttcaggcagctcaagttattcattgcccaaaaccaaatccttggcagctatttgctgcagcagaacaaggcctttgctgacagagaggtgcagatggagagctttcattcagcggtcatttctcaaagaaggcaggagttggacgacgccatcgctaagatggaccgactgagcttgcagatggaggaagaggacagagcaatggagcaagcccgaaaagaaatggaagaaggattgaagcagttccagaataggcaagttgcgaacgccctctttgccgttcttagcgctgtagctcagattgggcttgcattccttacggctggtgcaacggctcctggggctgcagcatctgcagcgcaagctgtgaacatagccggtcaggcggcgcaaggtctgcgaagggtggtggaaattctagagcagctggaggctgtgatggaggttgtggctgctgtgaaggacctcgtggattcattggaacaggtaggtcagattgtggacgcaccggtgatgccggaattgccctcagaggcggactggtccatttttgtgaacgaggtggaggccgtggcagagggcatgccaacggaagtctcggaggttccggtgtggagggccaagtgcaagaatgtggctgcactgggtagggagatgtgcatcacggcagaacagatttcccagctccagtatgacatctgggtgcaaggcttgttgcgggatatagctcaaagccacgcagaccggctggcagcgattcaacctgctaatcttaccaactatttggagatggcaatacagatggatatgcggactacgaggatactgatagggctcctcaacataatgcgcatccagaatgcggcacttatgtatgagtaccttctaacgcccacgcagctcactgcatggccgctgagaatggatactgtggccaacttgctcatcacgcacgagagtgctgcactgtcaggattagctcagttagggcccccatcggacttcacgagcaggcatgtagtgaaaggcatacctgtgagcttgcttctagacggtggggattgggaatttgagattcctgtgcaaggtggcatgtccagtttcccttccagctggactcgagtgcggattcggcacctggagatgcactttgtgcaggaggcgagcggtggcggcgagattatccaccagcctgccacccagacggggaccatttacatcctcctgcagggctccactgtcttccatgatcgcagaagggaggaggtgatgacctttcaggcagcggttccgctcaactaccattacgcgtaccgcctcgacactggagaagccactcttacgaacgagccctcggaacagtttgccaacacattcatgcagatgacaccgttcactcactggaggctacgtctgtctgcgtccgcagcggagaataaaggattagcctttcccacagctacagctcccgactccaccactgagattgccatcactttccatgttacggccattagacaaattgactggcggcacgacgaagag

SEQ ID NO: 448 - DNA, 2559 bp, synthetic construct
  misc_feature 1..2559: note = PtIP-83 polypeptide variant encoding polynucleotide
  source 1..2559: mol_type = other DNA
atggattacagcacgctttacagggatctgaaccagataagcatgcccctggatcgggtagagttctcagaggtgatggtaatccacaggatgtacttgaggttatctgatctgaatgtgggggagctccccggagccgagagggtgaagcggttgtatgtgttggcagacgtggtggagctcgcaacatttgcgcatccacagttgcttaatacgcggatgccaggatcggtgacggtgatcattctgtgtcgtcttcttcagtttccaactgatgggtcgttcgctgcttggctcgagctgccgttcatggagttgcacacactcatagaacaatacaggtcagagataaaagcagcagatgacgcgaaatggggaacgtatgtacacgcggaggaagtacagctcagcccgctgtttaatgggtggccttatctggttgttgaggcacagcgctgtattataaccgcggccatgcacaatacatttaaccgccctgggtgggttcgctccattactcaatttacaactgatcagtccggtcgggtagataccacactgctcgcacgaacagaattcggccatattgatctaccactcgaaacagattccccaacggcattcagtgtttcacaccgccaaagtacgaatttgcccgtagagtacaccggtattccagtggaggtggtgaccgatcctaacatcttgatgggcatgcaaaccagcgtgcacattgcggagctagtgaaggcatgttacccgtcaccagaattagtgagcgctgtaggggtgcacgtgaattggctcaacgaagtcttgctccgagttgtccagaaggaatctcagttgcaagggaccgaggcctacaacgagtgccttgcgcttttaggtcgcattcaatgtgtcatgaagatggggccgtttgtctcggtagtgccgcagctgcaatacagaatgtatggtagcctcatcagacaaatggcccaggtagcacagaactacgaccaagatttcaggcagctcaagttattcattgcccaaaaccaaatccttggcagctatttgctgcagcagaacagggcatttgctgacagagaggtgcagatggagagctttcattcagcggtcatttctcaaagaaggcaggagttggacgacgccatcgctaagatggaccgactgagcttgcagatggaggaagaggacagagcaatggagcaagcccgaaaagaaatggaagaaggattgaagcagttccagaatgagcaagttgcaagggctgtgttcgctgttcttaaatctgtagctatgattgcgctcgcattcgtcacggctggtgcaacggctcctggggctgcagcatctgcagcgcaagctgtgagcatagcaggtcaggcggcgcaaggtctgcgaagggtggtggaaattctagagcagctggaggctgtgatggaggttgtggctgctgtgaaggacctcgtggattcattggaacaggtaggtcagattgtggacgcaccggtgatgccggaattgccctcagaggcggactggtccatttttgtgaacgaggtggaggccgtggcagagggcatgccaacggaagtctcggaggttccggtgtggagggccaagtgcaagaatgtggctgcactgggtcgggagatgagcatcacggcagtacagatgtcggagctgcagtatgacatctgggtgcaaggcttgttgcgggatatagctcaaagccacgcagaccggctggcagcgattcaacctgctaatcttaccaactatttggagatggcaatacagatggatatgcggactacgaggatactgatagggctcctcaacataatgcgcatccagaatgcggcacttatgtatgagtaccttctaacgcccacgcagctcactgcatggccgctgagaatggatactgtggccaacttgctcatcacgcacgagagtgctgcactgtcaggattagctcagttagggccctcatctgatttcacgagcaggcatgtggtgaaagacatacctgtgaacttgctgctcgatggcgaggattgggagtttgagattcctgtgcaagctggcatgtccagcttcccttccagctggtctcgcgtccgtattcggcacctggagatgcactttgtgaaggaggccagcggtattggtggtgagattatccaccagcctaccacccagactgggaccgtttacatccttctgcagggttccactatcttccatgaccgcagaagagaccaggtgttgccttttcaggccgctgctccgctcaactaccattacgcgtaccgcctcgacaccggcgactccactctcacaaacgaaccctctgaacagtttgccaacaagttcatgcagatgacacccttcacccgttggaggcttcgtctgtctgcgtccgcaaaagagaatgcaggattagcctttcccacggctacagcacttgactccactacccagattgtcatcactttccatgttacggccatcagacaaattgactggcggcacgacgaagag

SEQ ID NO: 449 - DNA, 2556 bp, synthetic construct
  misc_feature 1..2556: note = PtIP-83 polypeptide variant encoding polynucleotide
  source 1..2556: mol_type = other DNA
atggattacagcacgctttacagggatctgaaccagataagcatgcccctggatcgggtagagttctcagaggtgatggtaatccacaggatgtacttgaggttatctgatctgaatgtgggggagctccccggagccgagagggtgaagcggttgtatgtgttggcagacgtggtggagctcgcaacatttgcgcatccacagttgcttaatacgcggatgccaggatcggtgacggtgatcattctgtgtcgtcttcttcagtttccaactgatgggtcgttcgctgcttggctcgagctgccgttcatggagttgcacacactcatagaacaatacaggtcagagataaaagcagcagatgacgcgaaatggggaacgtatgtacacgcggaggaagtacagctcagcccgctgtttaatgggtggccttatctggttgttgaggcacagcgctgtattataaccgcggccatgcacaatacatttaaccgccctgggtgggttcgctccattactcaatttacaactgatcagtccggtcgggtagataccacactgctcgcacgaacagaattcggccatattgatctaccactcgaaacagattccccaacggcattcagtgtttcacaccgccaaagtacgaatttgcccgtagagtacaccggtattccagtggaggtggtgaccgatcctaacatcttgatgggcatgcaaaccagcgtgcacattgcggagctagtcaaggcatgttacccgtcaccagaattagtgagcgctgtaggggtgcacgtgaattggctcaacgaagtcttgctccgagttgtccagaaggaatctcagttgcaagggaccgaggcctacaacgagtgccttgcgcttttaggtcgcattcaatgtgtcatgaagatggggccgtttgtctcggtagtgccgcagctgcaatacagaatgtatggtagcctcatcagacaaatggcccaggtagcacagaactacgaccaagatttcaggcagctcaagttattcattgcccaaaaccaaatccttggcagctatttgctgcagcagaacaaggcctttgctgacagagaggtgcagatggagagctttcattcagcggtcatttctcaaagaaggcaggagttggacgacgccatcgctaagatggaccgactgagcttgcagatggaggaagaggacagagcaatggagcaagcccgaaaagaaatggaagaaggattgaagcagttccagaatgagcaagttgcaagggctgtgttcgctgttcttaaatctgtagctatgattgcgctcgcattcgtcacggctggtgcaacggctcctggggctgcagcatctgcagcgcaagctgtgaacatagcaggtcaggcggcgcaaggtctgcgaagggtggtggaaattctagagcagctggaggctgtgatggaggttgtggctgctgtgaaggacctcgtggattcattggaacaggtaggtcagattgtggacgcaccggtgatgccggaattgccctcggaggcggactggagtatttttgtgaatgagattgaagccgtggcagaggggatgccgacggaagtctcggaggttccggtgtggagggccaagtgcaagaatgtggctgcactgggtagggagatgtgcatcacggcagaacagatttcccagctccagtatgacatctgggtgcaaggcttgttgcgggatatagctcaaagccacgcagaccggctggcagcgattcaacctgctaatcttaccaactatttggagatggcaatacagatggatatgcggactacgaggatactgatagggctcctcaacataatgcgcatccagaatgcggcacttatgtatgagtaccttctaacgcccacgcagctcactgcatggccgctgagaatggatactgtggccaacttgctcatcacgcacgagagtgctgcactgtcaggattagctcagttagggcccccatcggacttcacgagcaggcatgtagtgaaaggcatacctgtgagcttgcttctagacggtggggattgggaatttgagattcctgtgcaaggtggcatgtccagtttcccttccagctggactcgagtgcggattcggcacctggagatgcactttgtgcaggaggcgagcggtggcggcgagattatccaccagcctgccacccagacggggaccatttacatcctcctgcagggctccactgtcttccatgatcgcagaagggaggaggtgatgacctttcaggcagcggttccgctcaactaccattacgcgtaccgcctcgacaccggcgactccactctcacaaacgaaccctctgaacagtttgccaacaagttcatgcagatgacaccgttcactcactggaggctacgtctgtctgcgtccgcagcggagaataaaggattagcctttcccacagctacagctcccgactccaccactgagattgccatcactttccatgttacggccattagacaaattgactggcggcaagaggaggag

SEQ ID NO: 450 - DNA, 2556 bp, synthetic construct
  misc_feature 1..2556: note = PtIP-83 polypeptide variant encoding polynucleotide
  source 1..2556: mol_type = other DNA
atggattacagcacgctttacagggatctgaaccagataagcatgcccctggatcgggtagagttctcagaggtgatggtaatccacaggatgtacttgaggttatctgatctgaatgtggggcagctcgagggagccgagaaagtgaagcggttgtatgtgttggcagacgtggtggagctcgcaacatttgcgcatccacagttgcttaatacgcggatgccaggatcggtgacggtgatcatattgtgtcgtcttcttcaatggccaactgatgggtcgttcgctgcttggctcgagctgccgttcatggagttgcacacactcatagaacaatacaggtcagagataaaagcagcagatgacgcgaaatggggaacgtatgtacacgcggaggaagtacagctcagcccgctgtttaatgggtggccttatctggttgttgaggcacagcgctgtattataaccgcggccatgcacaatacatttaaccgccctgggtgggttcgctccattactcaatttacaactgatcagtccggtcgggtagataccacactgctcgcacgaacagaattcggccatattgatctaccactcgaaacagattccccaacggcattcagtgtttcacaccgccaaagtacgaatttgcccgtagagtacaccggtattccagtggaggtggtgaccgatcctaacatcttgatgggcatgcaaaccagcgtgcacattgcggagctagtgaaggcatgttacccgtcaccagaattagtgagcgctgtaggggtgcacgtgaattggctcaacgaagtcttgctccgagttgtccagaaggaatctcagttgcaagggaccgaggcctacaacgagtgccttgcgcttttaggtcgcattcaatgtgtcatgaagatggtgagaattggcttagtagtgccccagctgcaatacagaatgtacggtagcctcatcaaccaaatggcccaagtagcacaaaactacgaccgagaattcaagcaattcaaattattcatcatccaaaatcaaatccttggcagctatttgctgcagcagaacagggcatttgctgacagagaggtgcagatggagagctttcattcagcggtcatttctcaaagaaggcaggagttggacgacgccatcgctaagatggaccgactgagcttgcagatggaggaagaggacagagcaatggagcaagcccgaaaagaaatggaagaaggattgaagcagttccagaatgagcaagttgcaagggctgtgttcgctgttcttaaatctgtagctatgattgcgctcgcattcgtcacggctggtgcaacggctcctggggctgcagcatctgcagcgcaagctgtgaacatagccggtcaagcggcacaagctctgcgaagggtggtggaaattctagaggggctcgaggctgtgatggaggttgtggctgctataaagcaccttgtggatgctctggaccaggtaagtcagattgtggatgcaccacctatgccagacatgccctcggaggcgggctggtccatttttgtgaacgaggtggaggccgtggcagagggcatgccaacggaagtctcggaggttccggtgtggagggccaagtgcaagaatgtggctgcactgggtcgggagatgagcatcacggcagtacagatgtcggagctgcagtatgacatctgggtgcaaggcatgatgcgggatatggctcgaagccaggcagacaggctggccgcaattcaacccgcggaccttaccaactatttggagatggctacccagatggatatgcggactacgaggatgctgctggggctcctcaacatattgcgcatccagaatgcggcacttatgtatgagtaccttctaacgcccacgcagctcactgcatggccgctgagaatggatactgtggccaacttgctcatcacgcacgagagtgctgcactgtcaggattagctcagttagggcccccatcggacttcacgagcaggcatgtagtgaaaggcatacctgtgagcttgcttctagacggtggggattgggaatttgagattcctgtgcaaggtggcatgtccagtttcccttccagctggactcgagtgcggattcggcacctggagatgcactttgtgcaggaggcgagcggtggcggcgagattatccaccagcctgccacccagacggggaccatttacatcctcctgcagggctccactgtcttccatgatcgcagaagggaggaggtgatgacctttcaggcagcggttccgctcaactaccattacgcgtaccgcctcgacactggagaagccactcttacgaacgagccctcggaacagtttgccaacacattcatgcagatgacaccgttcactcactggaggctacgtctgtctgcgtccgcagcggagaataaaggattagcctttcccacagctacagctcccgactccaccactgagattgccatcactttccatgttacggccattagacaaattgactggcggcaagaggaggag

SEQ ID NO: 451 - DNA, 2559 bp, synthetic construct
  misc_feature 1..2559: note = PtIP-83 polypeptide variant encoding polynucleotide
  source 1..2559: mol_type = other DNA
atggattacagcacgctttacagggatctgaaccagataagcatgcccctggatcgggtagagttctcagaggtgatggtaatccacaggatgtacttgaggttatctgatctgaatgtgggggagctccccggagccgagagggtgaagcggttgtatgtgttggcagacgtggtggagctcgcaacatttgcgcatccacagttgcttaatacgcggatgccaggatcggtgacggtgatcattctgtgtcgtcttcttcagtttccaactgatgggtcgttcgctgcttggctcgagctgccgttcatggagttgcacacactcatagaacaatacaggtcagagataaaagcagcagatgacgcgaaatggggaacgtatgtacacgcggaggaagtacagctcagcccgctgtttaatgggtggccttatctggttgttgaggcacagcgctgtattataaccgcggccatgcacaatacatttaaccgccctgggtgggttcgctccattactcaatttacaactgatcagtccggtcgggtagataccacactgctcgcacgaacagaattcggccatattgatctaccactcgaaacagattccccaacggcattcagtgtttcacaccgccaaagtacgaatttgcccgtagagtacaccggtattccagtggaggtggtgaccgatcctaacatcttgatgggcatgcaaaccagcgtgcacattgcggagctagtgaaggcatgttacccgtcaccagaattagtgagcgctgtaggggtgcacgtgaattggctcaacgaagtcttgctccgagttgtccagaaggaatctcagttgcaagggaccgaggcctacaacgagtgccttgcgcttttaggtcgcattcaatgtgtcatgaagatggggccgtttgtctcggtagtgccgcagctgcaatacagaatgtatggtagcctcatcagacaaatggcccaggtagcacagaactacgaccaagatttcaggcagctcaagttattcattgcccaaaaccaaatccttggcagctatttgctgcagcagaacaaggcctttgctgacagagaggtgcagatggagagctttcattcagcggtcatttctcaaagaagggaggagttggacaatacattcgcaaagatggaccgattgagcgggcaaatggaggcagagagtagtgcaatggagcaagccaaaaaggaaatggacgaaggattgaggcagttccagaataggcaagttgcgaacgccctctttgccgttcttagcgctgtagctcagattgggcttgcattccttacggctggtgcaacggctcctggagctgtggcgtcggcggggcaagctgtgagcatagcaggtcaggcggcgcaaggtctgcgaagggtggtggaaattctagagcagctggaggctgtgatggaggttgtggctgctgtgaaggacctcgtggattcattggaacaggtaggtcagattgtggacgcaccggtgatgccggaattgccctcagaggcggactggtccatttttgtgaacgaggtggaggccgtggcagagggcatgccaacggaagtctcggaggttccggtgtggagggccaagtgcaagaatgtggctgcactgggtcgggagatgagcatcacggcagtacagatgtcggagctgcagtatgacatctgggtgcaaggcttgttgcgggatatagctcaaagccacgcagaccggctggcagcgattcaacctgctaatcttaccaactatttggagatggcaatacagatggatatgcggactacgaggatgctgctggggctcctcaacatattgcgcatccagaatgcggcgctcaggtacgagtatcttctaatgcccacggagctcacaacatggccactgggtatggataccgtgggtgacttgctcatcgcgcaggagaatgctgcactgataggattaatgcagctagggccctcatctgatttcacgagcaggcatgtggtgaaagacatacctgtgaacttgctgctcgatggcgaggattgggagtttgagattcctgtgcaagctggcatgtccagcttcccttccagctggtctcgcgtccgtattcggcacctggagatgcactttgtgaaggaggccagcggtattggtggtgagattatccaccggcctgccacccagacggggaccatttacatcctcctgcagggctccactgtcttccatgatcgcagaagggaggaggtgatgacctttcaggcagcggttccgctcaactaccattacgcgtaccgcctcgacactggagaagccactcttacgaacgagccctcggaacagtttgccaacacattcatgcagatgacaccgttcactcactggaggctacgtctgtctgcgtccgcagcggagaataaaggattagcctttcccacagctacagctcccgactccaccactgagattgccatcactttccatgttacggccattagacaaattgactggcggcaagaggaggag

SEQ ID NO: 452 - DNA, 2595 bp, synthetic construct
  misc_feature 1..2595: note = PtIP-83 polypeptide variant encoding polynucleotide
  source 1..2595: mol_type = other DNA
atggattacagcacgctttacagggatctgaaccagataagcatgcccctggatcgggtagagttctcagaggtgatggtaatccacaggatgtacttgaggttatctgatctgaatgtgggggagctccccggagccgagagggtgaagcggttgtatgtgttggcagacgtggtggagctcgcaacatttgcgcatccacagttgcttaatacgcggatgccaggatcggtgacggtgatcattctgtgtcgtcttcttcaatggccaactgatgggaggcagtcggacaccgagctccacctgacattcatgaagttgcatgccatacaacgagaggaaaatcggtgggagataaccgcagcagatggcatgaactggggagtttacatacacgcagaggaagtacaggttggcgtgctgacaatgtcatggtcttcggtacttagagtttcggcacttcgctctgttataacctccggctttcgcgccgttagtgtgtttgaggtaccgggaagtgtaaggtccacccttggagctactttaaggcccgatcacgccttatatagtacaactatgcaagccacacccaacgcatcgcatattagtgcttttaaccttcgcatagtttccccgtcggcatatcgtgtttgtcctctccaaaatgacacagatacctacttaggtattccagcagacgtggcggcagttcttccagtagacgtggtgactgatcctaacatcttgctgggcatgcagacaacggtacacattgcggagctagtcaaggcatgtcatccgtcacccgatgttgtgagcgctgtaggggagcacctgaactggctcaacaaactcttactcccacttaaggaatcgactcagttgcaaggaagcgagtcgtacaaggagtgccttgcactcttgggtcgtgttcacgctgcgatgaagatggtgagaattggcttagtagtgccccagctgcaatacagaatgtacggtagcctcatcaaccaaatggcccaagtagcacaaaactacgaccgagaattcaagcaattcaaattattcatcatccaaaatcaaatccttggcagctatttgctgcagcagaacagggcatttgctgagagggagctgcagatggagagctttcatgctgctgtcatttctcaaagaagggaggagttggacaatacattcgcaaagatggaccgactgagcttgcagatggaggaagaggacagagcaatggagcaagcccgaaaagaaatggaagaaggattgaagcagttccagaatgagcaagttgcaagggctgtgttcgctgttcttaaatctgtagctatgattgcgctcgcattcgtcacggctggtgcaacggctcctggggctgcagcatctgcagcgcaagctgtgaacatagccggtcaagcggcacaagctctgcgaagggtggtggaaattctagaggggctcgaggctgtgatggaggttgtggctgctataaagcaccttgtggatgctctggaccaggtaagtcagattgtggatgcaccacctatgccagacatgccctcggaggcggactggagtatttttgtgaatgagattgaagccgtggcagaggggatgccgacggaagtctcggaggttccggcgtggaaggccaagtgcaagaatgtggctgcactgggtcgggagatgagcatcacggcagtacagatgtcggagctgcagtatgacatctgggtgcaaggcatgatgcgggatatggctcgaagccaggcagacaggctggccgcaattcaacccgcggaccttaccaactatttggagatggctacccagatggatatgcggactacgaggatgctgctggggctcctcaacatattgcgcatccagaatgcggcgctcaggtacgagtatcttctaatgcccacggagctcacaacatggccactgggtatggataccgtgggtgacttgctcatcgcgcaggagaatgctgcactgataggattaatgcagctagggccctcatctgatttcacgagcaggcatgtggtgaaagacatacctgtgaacttgctgctcgatggcgaggattgggagtttgagattcctgtgcaagctggcatgtccagcttcccttccagctggtctcgcgtccgtattcggcacctggagatgcactttgtgaaggaggccagcggtattggtggtgagattatccaccagcctaccacccagactgggaccgtttacatccttctgcagggttccactatcttccatgaccgcagaagagaccaggtgttgccttttcaggccgctgctccgctcaactaccattacgcgtaccgcctcgacaccggcgactccactctcacaaacgaaccctctgaacagtttgccaacaagttcatgcagatgacacccttcacccgttggaggcttcgtctgtctgcgtccgcaaaagagaatgcaggattagcctttcccacggctacagcacttgactccactacccagattgtcatcactttccatgttacggccatcagacaaattgactggcggcacgacgaagag

SEQ ID NO: 453 - DNA, 2598 bp, synthetic construct
  misc_feature 1..2598: note = PtIP-83 polypeptide variant encoding polynucleotide
  source 1..2598: mol_type = other DNA
atggctctcgtggattacggcaagcttttcgaggatctgaaccagataagcatgggtgtactggatcgggtagagttttcagaggtgatggtgatccacaggatgtatgtgaggctagctgatctgaatgtggggcagctcgagggagccgagaaagtgaagcggttgtatgtgtttgcggacgtggtggagctaccagtcgtggaatggcggtggccgccgcaaataccaggatcggtgacggtgatcatattgtgtcgtcttcttcaatggccaactgatgggaggcagtcggacaccgagctccacctgacattcatgaagttgcatgccatacaacgagaggaaaatcggtgggagataaccgcagcagatggcatgaactggggagtttacatacacgcagaggaagtacaggttggcgtgctgacaatgtcatggtcttcggtacttagagtttcggcacttcgctctgttataacctccggctttcgcgccgttagtgtgtttgaggtaccgggaagtgtaaggtccacccttggagctactttaaggcccgatcacgccttatatagtacaactatgcaagccacacccaacgcatcgcatattagtgcttttaaccttcgcatagtttccccgtcggcatatcgtgtttgtcctctccaaaatgacacagatacctacttaggtattccagcagacgtggcggcagttcttccagtagacgtggtgactgatcctaacatcttgctgggcatgcagacaacggtacacattgcggagctagtcaaggcatgtcatccgtcacccgatgttgtgagcgctgtaggggagcacctgaactggctcaacaaactcttactcccacttaaggaatcgactcagttgcaaggaagcgagtcgtacaaggagtgccttgcactcttgggtcgtgttcacgctgcgatgaagatggtgagaattggcttagtagtgccccagctgcaatacagaatgtacggtagcctcatcagacaaatggcccaggtagcacagaactacgaccaagatttcaggcagctcaagttattcattgcccaaaaccaaatccttggcagctatttgctgcagcagaacaaggcctttgctgacagagaggtgcagatggagagctttcattcagcggtcatttctcaaagaagggaggagttggacgacgccatcgctaagatggaccgactgagcttgcagatggaggaagaggacagagcaatggagcaagcccgaaaagaaatggaagaaggattgaagcagttccagaatgagcaagttgcaagggctgtgttcgctgttcttaaatctgtagctatgattgcgctcgcattcgtcacggctggtgcaacggctcctggggctgcagcatctgcagcgcaagctgtgaacatagccggtcaagcggcacaagctctgcgaagggtggtggaaattctagaggggctcgaggctgtgatggaggttgtggctgctataaagcaccttgtggatgctctggaccaggtaagtcagattgtggatgcaccgcctatgccagacatgccctcggaggcggactggagtatttttgtgaatgagattgaagccgtggcagaggggatgccgacggaagtctcggaggttccggcgtggaaggccaagtgcaagaatgtggctgcactgggtcgggagatgagcatcacggcagtacagatgtcggagctgcagtatgacatctgggtgcaaggcatgatgcgggatatggctcgaagccaggcagacaggctggccgcaattcaacccgcggaccttaccaactatttggagatggcaatacagatggatatgcggactacgaggatgctgctggggctcctcaacatattgcgcatccagaatgcggcgctcaggtacgagtatcttctaatgcccacggagctcacaacatggccactgggtatggataccgtgggtgacttgctcatcgcgcaggagaatgctgcactgataggattaatgcagctagggcccccatcggacttcacgagcaggcatgtagtgaaaggcatacctgtgagcttgcttctagacggtggggattgggaatttgagattcctgtgcaaggtggcatgtccagtttcccttccagctggactcgagtgcggattcggcacctggagatgcactttgtgcaggaggcgagcggtggcggtgagattatccaccagcctaccacccagactgggaccgtttacatccttctgcagggttccactatcttccatgaccgcagaagagaccaggtgttgccttttcaggccgctgctccgctcaactaccattacgcgtaccgcctcgacaccggcgactccactctcacaaacgaaccctctgaacagtttgccaacaagttcatgcagatgacacccttcacccgttggaggcttcgtctgtctgcgtccgcagcggagaataaaggattagcctttcccacagctacagctcccgactccaccactgagattgccatcactttccatgttacggccattagacaaattgactggcggcaagaggaggag

SEQ ID NO: 454 - DNA, 2553 bp, synthetic construct; identical to SEQ ID NO: 432
  misc_feature 1..2553: note = PtIP-83 polypeptide variant encoding polynucleotide
  source 1..2553: mol_type = other DNA

SEQ ID NO: 455 - DNA, 2559 bp, synthetic construct; identical to SEQ ID NO: 442
  misc_feature 1..2559: note = PtIP-83 polypeptide variant encoding polynucleotide
  source 1..2559: mol_type = other DNA

SEQ ID NO: 456 - DNA, 2556 bp, synthetic construct
  misc_feature 1..2556: note = PtIP-83 polypeptide variant encoding polynucleotide
  source 1..2556: mol_type = other DNA
atggattacagcacgctttacagggatctgaaccagataagcatgcccctggatcgggtagagttctcagaggtgatggtaatccacaggatgtacttgaggttatctgatctgaatgtgggggagctccccggagccgagagggtgaagcggttgtatgtgttggcagacgtggtggagctcgcaacatttgcgcatccacagttgcttaatacgcggatgccaggatcggtgacggtgatcattctgtgtcgtcttcttcagtttccaactgatgggtcgttcgctgcttggctcgagctgccgttcatggagttgcacacactcatagaacaatacaggtcagagataaaagcagcagatgacgcgaaatggggaacgtatgtacacgcggaggaagtacagctcagcccgctgtttaatgggtggccttatctggttgttgaggcacagcgctgtattataaccgcggccatgcacaatacatttaaccgccctgggtgggttcgctccattactcaatttacaactgatcagtccggtcgggtagataccacactgctcgcacgaacagaattcggccatattgatctaccactcgaaacagattccccaacggcattcagtgtttcacaccgccaaagtacgaatttgcccgtagagtacaccggtattccagtggaggtggtgaccgatcctaacatcttgatgggcatgcaaaccagcgtgcacattgcggagctagtgaaggcatgttacccgtcaccagaattagtgagcgctgtaggggtgcacgtgaattggctcaacgaagtcttgctccgagttgtccagaaggaatctcagttgcaagggaccgaggcctacaacgagtgccttgcgcttttaggtcgcattcaatgtgtcatgaagatggggccgtttgtctcggtagtgccgcagctgcaatacagaatgtatggtagcctcatcagacaaatggcccaggtagcacagaactacgaccaagatttcaggcagctcaagttattcattgcccaaaaccaaatccttggcagctatttgctgcagcagaacaaggcctttgctgacagagaggtgcagatggagagctttcattcagcggtcatttctcaaagaaggcaggagttggacgacgccatcgctaagatggaccgactgagcttgcagatggaggaagaggacagagcaatggagcaagcccgaaaagaaatggaagaaggattgaagcagttccagaatgagcaagttgcaagggctgtgttcgctgttcttaaatctgtagctatgattgcgctcgcattcgtcacggctggtgcaacggctcctggagctgtggcgtcggcggggcaagctgtgagcatagcaggtcaggcggcgcaaggtctgcgaagggtggtggaaattctagagcagctggaggctgtgatggaggttgtggctgctgtgaaggacctcgtggattcattggaacaggtaggtcagattgtggacgcaccggtgatgccggaattgccctcagaggcggactggtccatttttgtgaacgaggtggaggccgtggcagaggggatgccgacggaagtctcggaggttccggtgtggagggccaagtgcaagaatgtggctgcactgggtagggagatgtgcatcacggcagaacagatttcccagctccagtatgacatctgggtgcaaggcttgttgcgggatatagctcaaagccacgcagaccggctggcagcgattcaacctgctaatcttaccaactatttggagatggcaatacagatggatatgcggactacgaggatactgatagggctcctcaacataatgcgcatccagaatgcggcacttatgtatgagtaccttctaacgcccacgcagctcactgcatggccgctgagaatggatactgtggccaacttgctcatcacgcacgagagtgctgcactgtcaggattagctcagttagggcccccatcggacttcacgagcaggcatgtagtgaaaggcatacctgtgagcttgcttctagacggtggggattgggaatttgagattcctgtgcaaggtggcatgtccagtttcccttccagctggactcgagtgcggattcggcacctggagatgcactttgtgcaggaggcgagcggtggcggcgagattatccaccagcctgccacccagacggggaccgtttacatccttctgcagggttccactatcttccatgaccgcagaagagaccaggtgttgccttttcaggccgctgctccgctcaactaccattacgcgtaccgcctcgacaccggcgactccactctcacaaacgaaccctctgaacagtttgccaacaagttcatgcagatgacacccttcacccgttggaggcttcgtctgtctgcgtccgcaaaagagaatgcaggattagcctttcccacggctacagcacttgactccactacccagattgtcatcactttccatgttacggccatcagacaaattgactggcggcacgacgaagag

SEQ ID NO: 457 - DNA, 2556 bp, synthetic construct
  misc_feature 1..2556: note = PtIP-83 polypeptide variant encoding polynucleotide
  source 1..2556: mol_type = other DNA
atggattacagcacgctttacagggatctgaaccagataagcatgcccctggatcgggtagagttctcagaggtgatggtaatccacaggatgtatgtgaggctagctgatctgaatgtggggcagctccccggagccgagagggtgaagcggttgtatgtgttggcagacgtggtggagctcgcaacatttgcgcatccacagttgcttaatacgcggatgccaggatcggtgacggtgatcattctgtgtcgtcttcttcagtttccaactgatgggtcgttcgctgcttggctcgagctgccgttcatggagttgcacacactcatagaacaatacaggtcagagataaaagcagcagatgacgcgaaatggggaacgtatgtacacgcggaggaagtacagctcagcccgctgtttaatgggtggccttatctggttgttgaggcacagcgctgtattataaccgcggccatgcacaatacatttaaccgccctgggtgggttcgctccattactcaatttacaactgatcagtccggtcgggtagataccacactgctcgcacgaacagaattcggccatattgatctaccactcgaaacagattccccaacggcattcagtgtttcacaccgccaaagtacgaatttgcccgtagagtacaccggtattccagtggaggtggtgaccgatcctaacatcttgatgggcatgcaaaccagcgtgcacattgcggagctagtcaaggcatgtcatccgtcacccgatgttgtgagcgctgtaggggtgcacgtgaattggctcaacgaagtcttgctccgagttgtccagaaggaatctcagttgcaagggaccgaggcctacaacgagtgccttgcgcttttaggtcgcattcaatgtgtcatgaagatggggccgtttgtctcggtagtgccccagctgcaatacagaatgtacggtagcctcatcaaccaaatggcccaagtagcacaaaactacgaccgagaattcaagcaattcaaattattcatcatccaaaatcaaatccttggcagctatttgctgcagcagaacagggcatttgctgagagggagctgcagatggagagctttcatgctgctgtcatttctcaaagaagggaggagttggacaatacattcgcaaagatggaccgattgagcgggcaaatggaggcagagagtagtgcaatggagcaagccaaaaaggaaatggacgaaggattgaggcagttccagaataggcaagttgcgaacgccctctttgccgttcttagcgctgtagctcagattgggcttgcattccttacggctggtgcaacggctcctggggctgcagcatctgcagcgcaagctgtgaacatagccggtcaagcggcgcaaggtctgcgaagggtggtggaaattctagagcagctggaggctgtgatggaggttgtggctgctgtgaaggacctcgtggattcattggaacaggtaggtcagattgtggacgcaccggtgatgccggaattgccctcagaggcggactggtccatttttgtgaacgaggtggaggccgtggcagagggcatgccaacggaagtctcggaggttccggtgtggaaggccaagtgcaagaatgtggctgcactgggtcgggagatgagcatcacggcagtacagatgtcggagctgcagtatgacatctgggtgcaaggcatgatgcgggatatagctcaaagccacgcagaccggctggcagcgattcaacctgctaatcttaccaactatttggagatggcaatacagatggatatgcggactacgaggatactgatagggctcctcaacatattgcgcatccagaatgcggcgctcaggtacgagtatcttctaatgcccacggagctcacaacatggccactgggtatggatactgtggccaacttgctcatcacgcacgagagtgctgcactgtcaggattagctcagttagggcccccatcggacttcacgagcaggcatgtagtgaaaggcatacctgtgagcttgcttctagacggtggggattgggaatttgagattcctgtgcaaggtggcatgtccagtttcccttccagctggactcgagtgcggattcggcacctggagatgcactttgtgcaggaggcgagcggtggcggcgagattatccaccagcctgccacccagacggggaccatttacatcctcctgcagggctccactgtcttccatgatcgcagaagggaggaggtgatgacctttcaggcagcggttccgctcaactaccattacgcgtaccgcctcgacaccggcgactccactctcacaaacgaaccctctgaacagtttgccaacaagttcatgcagatgacacccttcacccgttggaggcttcgtctgtctgcgtccgcagcggagaataaaggattagcctttcccacagctacagctcccgactccaccactgagattgccatcactttccatgttacggccattagacaaattgactggcggcacgacgaagag

SEQ ID NO: 458 - DNA, 2556 bp, synthetic construct
  misc_feature 1..2556: note = PtIP-83 polypeptide variant encoding polynucleotide
  source 1..2556: mol_type = other DNA
atggattacagcacgctttacagggatctgaaccagataagcatgcccctggatcgggtagagttctcagaggtgatggtaatccacaggatgtacttgaggttatctgatctgaatgtgggggagctccccggagccgagagggtgaagcggttgtatgtgtttgtggacgtggtggagctcgcaacatttgcgcatccacagttgcttaatacgcggatgccaggatcggtgacggtgatcattctgtgtcgtcttcttcagtttccaactgatgggtcgttcgctgcttggctcgagctgccgttcatggagttgcacacactcatagaacaatacaggtcagagataaaagcagcagatgacgcgaaatggggaacgtatgtacacgcggaggaagtacagctcagcccgctgtttaatgggtggccttatctggttgttgaggcacagcgctgtattataaccgcggccatgcacaatacatttaaccgccctgggtgggttcgctccattactcaatttacaactgatcagtccggtcgggtagataccacactgctcgcacgaacagaattcggccatattgatctaccactcgaaacagattccccaacggcattcagtgtttcacaccgccaaagtacgaatttgcccgtagagtacaccggtattccagtggaggtggtgaccgatcctaacatcttgatgggcatgcaaaccagcgtgcacattgcggagctagtgaaggcatgttacccgtcaccagaattagtgagcgctgtaggggtgcacgtgaattggctcaacgaagtcttgctccgagttgtccagaaggaatctcagttgcaagggaccgaggcctacaacgagtgccttgcgcttttaggtcgcattcaatgtgtcatgaagatggggccgtttgtctcggtagtgccccagctgcaatacagaatgtacggtagcctcatcaaccaaatggcccaggtagcacagaactacgaccaagatttcaggcagctcaagttattcattgcccaaaaccaaatccttggcagctatttgctgcagcagaacaaggcctttgctgacagagaggtgcagatggagagctttcattcagcggtcatttctcaaagaaggcaggagttggacgacgccatcgctaagatggaccgactgagcttgcagatggaggcagagagtagtgcaatggagcaagccaaaaaggaaatggacgaaggattgaggcagttccagaataggcaagttgcgaacgccctctttgccgttcttagcgctgtagctcagattgggcttgcattccttacggctggtgcaacggctcctggagctgtggcgtcggcggggcaagctgtgagcatagcaggtcaggcggcgcaaggtctgcgaagggtggtggaaattctagagcagctggaggctgtgatggaggttgtggctgctgtgaaggacctcgtggattcattggaacaggtaggtcagattgtggacgcaccggtgatgccggaattgccctcagaggcggactggtccatttttgtgaacgaggtggaggccgtggcagagggcatgccaacggaagtctcggaggttccggtgtggagggccaagtgcaagaatgtggctgcactgggtcgggagatgagcatcacggcagtacagatgtcggagctgcagtatgacatctgggtgcaaggcatgatgcgggatatggctcgaagccaggcagacaggctggccgcaattcaacccgcggaccttaccaactatttggagatggctacccagatggatatgcggactacgaggatactgatagggctcctcaacataatgcgcatccagaatgcggcacttatgtatgagtaccttctaacgcccacgcagctcactgcatggccgctgagaatggatactgtggccaacttgctcatcacgcacgagagtgctgcactgtcaggattagctcagttagggcccccatcggacttcacgagcaggcatgtggtgaaagacatacctgtgaacttgctgctcgatggcgaggattgggagtttgagattcctgtgcaagctggcatgtccagcttcccttccagctggtctcgcgtccgtattcggcacctggagatgcactttgtgaaggaggccagcggtggcggcgagattatccaccagcctgccacccagacggggaccatttacatcctcctgcagggctccactgtcttccatgatcgcagaagggaggaggtgatgacctttcaggcagcggttccgctcaactaccattacgcgtaccgcctcgacactggagaagccactcttacgaacgagccctcggaacagtttgccaacacattcatgcagatgacaccgttcactcactggaggctacgtctgtctgcgtccgcagcggagaataaaggattagcctttcccacggctacagcacttgactccactacccagattgtcatcactttccatgttacggccattagacaaattgactggcggcacgaggaggag

SEQ ID NO: 459 - DNA, 2569 bp, synthetic construct
  misc_feature 1..2569: note = PtIP-83 polypeptide variant encoding polynucleotide
  source 1..2569: mol_type = other DNA
atggctctcgtggattacggcaagcttttcgaggatctgaaccagataagcatgcccctggatcgggtagagttctcagaggtgatggtaatccacaggatgtacttgaggttatctgatctgaatgtgggggagctccccggagccgagagggtgaagcggttgtatgtgtttgcggacgtggtggagctcgcaacatttgcgcatccacagttgcttaatacgcggatgccaggatcggtgacggtgatcattctgtgtcgtcttcttcagtttccaactgatgggtcgttcgctgcttggctcgagctgccgttcatggagttgcacacactcatagaacaatacaggtcagagataaaagcagcagatgacgcgaaatggggaacgtatgtacacgcggaggaagtacagctcagcccgctgtttaatgggtggccttatctggttgttgaggcacagcgctgtattataaccgcggccatgcacaatacatttaaccgccctgggtgggttcgctccattactcaatttacaactgatcagtccggacgggtagataccacactgctcgcacgaacagaattcggccatattgatctaccactcgaaacagattccccaacggcattcagtgtttcacaccgccaaagtacgaatttgcccgtagagtacaccggtattccagtggaggtggtgaccgatcctaacatcttgatgggcatgcaaaccagcgtgcacattgcggagctagtgaaggcatgttacccgtcaccagaattagtgagcgctgtaggggtgcacgtgaattggctcaacgaagtcttgctccgagttgtccagaaggaatctcagttgcaagggaccgaggcctacaacgagtgccttgcgcttttaggtcgcattcaatgtgtcatgaagatggggccgtttgtctcggtagtgccccagctgcaatacagaatgtacggtagcctcatcaaccaaatggcccaagtagcacaaaactacgaccgagaattcaagcaattcaaattattcatcatccaaaatcaaatccttggcagctatttgctgcagcagaacagggcatttgctgagagggagctgcagatggagagctttcatgctgctgtcatttctcaaagaagggaggagttggacaatacattcgcaaagatggaccgattgagcgggcaaatggaggcagagagtagtgcaatggagcaagccaaaaaggaaatggacgaaggattgaggcagttccagaataggcaagttgcgaacgccctctttgccgttcttagcgctgtagctcagattgggcttgcattccttacggctggtgcaacggctcctggggctgcagcatctgcagcgcaagctgtgaacatagccggtcaagcggcacaagctctgcgaagggtggtggaaattctagaggggctcgaggctgtgatggaggttgtggctgctataaagcaccttgtggatgctctggaccaggtaagtcagattgtggatgcaccacctatgccagacatgccctcggaggcggactggagtatttttgtgaatgagattgaagccgtggcagaggggatgccgacggaagtctcggaggttccggcgtggaaggccaagtgcaagaatgtggctgcactgggtagggagatgtgcatcacggcagaacagatttcccagctccagtatgacatctgggtgcaaggcttgttgcgggatatagctcaaagccacgcagaccggctggcagcgattcaacctgctaatcttaccaactatttggagatggcaatacagatggatatgcggactacgaggatactgatagggctcctcaacataatgcgcatccagaatgcggcacttatgtatgagtaccttctaacgcccacgcagctcactgcatggccgctgagaatggatactgtggccaacttgctcatcacgcacgagagtgctgcactgtcaggattagctcagttagggcccccatcggacttcacgagcaggcatgtggtgaaaggcatacctgtgagcttgcttctagacggtggggattgggaatttgagattcctgtgcaaggtggcatgtccagtttcccttccagctggactcgagtgcggattcggcacctggagatgcactttgtgcaggaggcgagcggtggcggcgagattatccaccagcctgccacccagacggggaccatttacatcctcctgcagggctccactgtcttccatgatcgcagaagggaggaggtgatgacctttcaggcagcggttccgctcaactaccattacgcgtaccgcctcgacactggagaagccactctcacaaacgaaccctctgaacagtttgccaacaagttcatgcagatgacacccttcacccgttggaggcttcgtctgtctgcgtccgcaaaagagaatgcaggattagcctttcccacggctacagcacttgactccactacccagattgtcatcactttccatgttacggccatcagacaaattgactggcggcacgacgaagagtagc

SEQ ID NO: 460 - DNA, 2556 bp, synthetic construct
  misc_feature 1..2556: note = PtIP-83 polypeptide variant encoding polynucleotide
  source 1..2556: mol_type = other DNA
atggattacagcacgctttacagggatctgaaccagataagcatgcccctggatcgggtagagttctcagaggtgatggtaatccacaggatgtacttgaggttatctgatctgaatgtgggggagctccccggagccgagagggtgaagcggttgtatgtgttggcagacgtggtggagctcgcaacatttgcgcatccacagttgcttaatacgcggatgccaggatcggtgacggtgatcattctgtgtcgtcttcttcagtttccaactgatgggtcgttcgctgcttggctcgagctgccgttcatggagttgcacacactcatagaacaatacaggtcagagataaaagcagcagatgacgcgaaatggggaacgtatgtacacgcggaggaagtacagctcagcccgctgtttaatgggtggccttatctggttgttgaggcacagcgctgtattataaccgcggccatgcacaatacatttaaccgccctgggtgggttcgctccattactcaatttacaactgatcagtccggtcgggtagataccacactgctcgcacgaacagaattcggccatattgatctaccactcgaaacagattccccaacggcattcagtgtttcacaccgccaaagtacgaatttgcccgtagagtacaccggtattccagtggaggtggtgaccgatcctaacatcttgatgggcatgcaaaccagcgtgcacattgcggagctagtgaaggcatgtcatccgtcaccagaattagtgagcgctgtaggggtgcacgtgaattggctcaacgaagtcttgctccgagttgtccagaaggaatctcagttgcaagggaccgaggcctacaacgagtgccttgcgcttttaggtcgcattcaatgtgtcatgaagatggggccgtttgtctcggtagtgccgcagctgcaatacagaatgtatggtagcctcatcagacaaatggcccaggtagcacagaactacgaccaagatttcaggcagctcaagttattcattgcccaaaaccaaatccttggcagctatttgctgcagcagaacaaggcctttgctgacagagaggtgcagatggagagctttcatgctgctgtcatttctcaaagaagggaggagttggacgacgccatcgctaagatggaccgactgagcttgcagatggaggaagaggacagagcaatggagcaagcccgaaaagaaatggaagaaggattgaagcagttccagaatgagcaagttgcaagggctgtgttcgctgttcttagcgctgtagctcagattgggcttgcattccttacggctggtgcaacggctcctggagctgcagcatctgcagcgcaagctgtgaacatagccggtcaagcggcacaagctctgcgaagggtggtggaaattctagaggggctcgaggctgtgatggaggttgtggctgctataaagcaccttgtggatgctctggaccaggtaagtcagattgtggatgcaccacctatgccagacatgccctcggaggcggactggagtatttttgtgaatgagattgaagccgtggcagaggggatgccgacggaagtctcggaggttccggcgtggaaggccaagtgcaagaatgtggctgcactgggtagggagatgtgcatcacggcagaacagatttcccagctccagtatgacatctgggtgcaaggcttgttgcgggatatagctcaaagccacgcagaccggctggcagcgattcaacctgctaatcttaccaactatttggagatggcaatacagatggatatgcggactacgaggatactgatagggctcctcaacataatgcgcatccagaatgcggcacttatgtatgagtaccttctaacgcccacgcagctcactgcatggccgctgagaatggatactgtggccaacttgctcatcacgcacgagagtgctgcactgtcaggattagctcagttagggcccccatcggacttcacgagcaggcatgtagtgaaaggcatacctgtgagcttgcttctagacggtggggattgggaatttgagattcctgtgcaaggtggcatgtccagtttcccttccagctggactcgagtgcggattcggcacctggagatgcactttgtgcaggaggcgagcggtggcggcgagattatccaccagcctgccacccagacggggaccatttacatcctcctgcagggctccactgtcttccatgatcgcagaagggaggaggtgatgacctttcaggcagcggttccgctcaactaccattacgcgtaccgcctcgacactggagaagccactcttacgaacgagccctcggaacagtttgccaacacattcatgcagatgacaccgttcactcactggaggcttcgtctgtccgcgtccgcaaaagagaatgcaggattagcctttcccacggctacagcacttgactccactacccagattgtcatcactttccatgttacggccatcagacaaattgactggcggcacgacgaagag

SEQ ID NO: 461 - DNA, 2556 bp, synthetic construct
  misc_feature 1..2556: note = PtIP-83 polypeptide variant encoding polynucleotide
  source 1..2556: mol_type = other DNA
atggattacagcacgctttacagggatctgaaccagataagcatgcccctggatcgggtagagttctcagaggtgatggtaatccacaggatgtacttgaggttatctgatctgaatgtgggggagctccccggagccgagagggtgaagcggttgtatgtgttggcagacgtggtggagctcgcagcatttgcgcatccacagttgcttaatacgcggatgccaggatcggtgacggtgatcattctgtgtcgtcttcttcagtttccaactgatgggtcgttcgctgcttggctcgagctgccgttcatggagttgcacacactcatagaacaatacaggtcagagataaaagcagcagatgacgcgaaatggggaacgtatgtacacgcggaggaagtacagctcagcccgctgtttaatgggtggccttatctggttgttgaggcacagcgctgtattataaccgcggccatgcacaatacatttaaccgccctgggtgggttcgctccattactcaatttacaactgatcagtccggtcgggtagataccacactgctcgcacgaacagaattcggccatattgatctaccactcgaaacagattccccaacggcattcagtgtttcacaccgccaaagtacgaatttgcccgtagagtacaccggtattccagtggaggtggtgaccgatcctaacatcttgatgggcatgcaaaccagcgtgcacattgcggagctagtgaaggcatgttacccgtcaccagaattagtgagcgctgtaggggtgcacgtgaattggctcaacgaagtcttgctccgagttgtccagaaggaatctcagttgcaagggaccgaggcctacaacgagtgccttgcgcttttaggtcgcattcaatgtgtcatgaagatggggccgtttgtctcggtagtgccgcagctgcaatacagaatgtatggtagcctcatcagacaaatggcccaggtagcacagaactacgaccaagatttcaggcagctcaagttattcattgcccaaaaccaaatccttggcagctatttgctgcagcagaacaaggcctttgctgacagagaggtgcagatggagagctttcattcagcggtcatttctcaaagaaggcaggagttggacaatacattcgcaaagatggaccgattgagcgggcaaatggaggcagagagtagtgcaatggagcaagccaaaaaggaaatggacgaaggattgaggcagttccagaataggcaagttgcgaacgccctctttgccgttcttagcgctgtagctcagattgggcttgcattccttacggctggtgcaacggctcctggagctgtggcgtcggcggggcaagctgtgagcatagcaggtcaggcggcgcaaggtctgcgaagggtggtggaaattctagagcagctggaggctgtgatggaggttgtggctgctgtgaaggacctcgtggattcattggaacaggtaggtcagattgtggacgcaccggtgatgccggaattgccctcagaggcggactggtccatttttgtgaacgaggtggaggccgtggcagagggcatgccaacggaagtctcggaggttccggtgtggagggccaagtgcaagaatgtggctgcactgggtcgggagatgagcatcacggcagtacagatgtcggagctccagtatgacatctgggtgcaaggcttgttgcgggatatagctcaaagccacgcagaccggctggcagcgattcaacctgctaatcttaccaactatttggagatggcaatacagatggatatgcggactacgaggatgctgctggggctcctcaacataatgcgcatccagaatgcggcacttatgtatgagtatcttctaatgcccacggagctcacaacatggccactgggtatggataccgtgggtgacttgctcatcgcgcaggagaatgctgcactgataggattaatgcagctagggccctcatctgatttcacgagcaggcatgtggtgaaagacatacctgtgaacttgctgctcgatggcgaggattgggaatttgagattcctgtgcaaggtggcatgtccagtttcccttccagctggactcgagtgcggattcggcacctggagatgcactttgtgcaggaggcgagcggtggcggtgagattatccaccagcctaccacccagactgggaccgtttacatccttctgcagggctccactgtcttccatgatcgcagaagggaggaggtgatgacctttcaggcagcggttccgctcaactaccattacgcgtaccgcctcgacactggagaagccactcttacgaacgagccctcggaacagtttgccaacacattcatgcagatgacaccgttcactcactggaggctacgtctgtctgcgtccgcagcggagaataaaggattagcctttcccacggctacagcacttgactccactacccagattgtcatcactttccatgttacggccattagacaaattgactggcggcaagaggaggag

SEQ ID NO: 462 - DNA, 2559 bp, synthetic construct
  misc_feature 1..2559: note = PtIP-83 polypeptide variant encoding polynucleotide
  source 1..2559: mol_type = other DNA
atggattacagcacgctttacagggatctgaaccagataagcatgcccctggatcgggtagagttctcagaggtgatggtaatccacaggatgtacttgaggttatctgatctgaatgtgggggagctccccggagccgagagggtgaagcggttgtatgtgttggcagacgtggtggagctcgcaacatttgcgcatccacagttgcttaatacgcggatgccaggatcggtgacggtgatcattctgtgtcgtcttcttcagtttccaactgatgggtcgttcgctgcttggctcgagctgccgttcatggagttgcacacactcatagaacaatacaggtcagagataaaagcagcagatgacgcgaaatggggaacgtatgtacacgcggaggaagtacagctcagcccgctgtttaatgggtggccttatctggttgttgaggcacagcgctgtattataaccgcggccatgcacaatacatttaaccgccctgggtgggttcgctccattactcaatttacaactgatcagtccggtcgggtagataccacactgctcgcacgaacagaattcggccatattgatctaccactcgaaacagattccccaacggcattcagtgtttcacaccgccaaagtacgaatttgcccgtagagtacaccggtattccagtggaggtggtgaccgatcctaacatcttgatgggcatgcaaaccagcgtgcacattgcggagctagtgaaggcatgttacccgtcacccgatgttgtgagcgctgtaggggagcacctgaactggctcaacgaagtcttgctccgagttgtccagaaggaatcgactcagttgcaaggaagcgagtcgtacaaggagtgccttgcactcttgggtcgtgttcacgctgcgatgaagatggtgagaattggcttagtagtgccccagctgcaatacagaatgtacggtagcctcatcaaccaaatggcccaagtagcacaaaactacgaccgagaattcaagcaattcaaattattcatcatccaaaatcaaatccttggcagctatttgctgcagcagaacagggcatttgctgagagggagctgcagatggagagctttcatgctgctgtcatttctcaaagaaggcaggagttggacgacgccatcgcaaagatggaccgattgagcgggcaaatggaggcagagagtagtgcaatggagcaagccaaaaaggaaatggacgaaggattgaggcagttccagaataggcaagttgcgaacgccctctttgccgttcttagcgctgtagctcagattgggcttgcattccttacggctggtgcaacggctcctggagctgtggcgtcggcggggcaagctgtgagcatagcaggtcaggcggcgcaaggtctgcgaagggtggtggaaattctagagcagctggaggctgtgatggaggttgtggctgctgtgaaggacctcgtggattcattggaacaggtaggtcagattgtggacgcaccggtgatgccggaattgccctcagaggcggactggtccatttttgtgaacgaggtggaggccgtggcagaggggatgccgacggaagtctcggaggttccggcgtggaaggccaagtgcaagaatgtggctgcactgggtagggagatgtgcatcacggcagaacagatttcccagctccagtatgacatctgggtgcaaggcttgttgcgggatatagctcaaagccacgcagaccgactggcagcgattcaacctgctaatcttaccaactatttggagatggcaatacagatggatatgcggactacgaggatactgatagggctcctcaacataatgcgcatccagaatgcggcacttatgtatgagtaccttctaacgcccacggagctcacaacatggccactgggtatggataccgtgggtgacttgctcatcgcgcaggagaatgctgcactgataggattaatgcagctagggccctcatctgatttcacgagcaggcatgtagtgaaaggcatacctgtgagcttgcttctagacggtggggattgggaatttgagattcctgtgcaaggtggcatgtccagtttcccttccagctggactcgagtgcggattcggcacctggagatgcactttgtgcaggaggcgagcggtggcggcgagattatccaccagcctgccacccagacggggaccatttacatcctcctgcagggctccactgtcttccatgatcgcagaagggaggaggtgatgacctttcaggcagcggttccgctcaactaccattacgcgtaccgcctcgacactggagaagccactcttacgaacgagccctcggaacagtttgccaacacattcatgcagatgacaccgttcactcactggaggctacgtctgtctgcgtccgcaaaagagaatgcaggattagcctttcccacggctacagcacttgactccactacccagattgtcatcactttccatgttacggccatcagacaaattgactggcggcaagaggaggag

SEQ ID NO: 463 - DNA, 2562 bp, synthetic construct
  misc_feature 1..2562: note = PtIP-83 polypeptide variant encoding polynucleotide
  source 1..2562: mol_type = other DNA
atggattacagcacgctttacagggatctgaaccagataagcatgggtgtactggatcgggtagagttttcagaggtgatggtaatccacaggatgtacttgaggttatctgatctgaatgtgggggagctccccggagccgagagggtgaagcggttgtatgtgttggcagacgtggtggagctcgcaacatttgcgcatccacagttgcttaatacgcggatgccaggatcggtgacggtgatcattctgtgtcgtcttcttcagtttccaactgatgggtcgttcgctgcttggctcgagctgccgttcatgaagttgcacacactcatagaacaatacaggtcagagataaaagcagcagatgacgcgaaatggggaacgtatgtacacgcggaggaagtacagctcagcccgctgtttaatgggtggccttatctggttgttgaggcacagcgctgtattataaccgcggccatgcacaatacatttaaccgccctgggtgggttcgctccattactcaatttacaactgatcagtccggtcgggtagataccacactgctcgcacgaacagaattcggccatattgatctaccactcgaaacagattccccaacggcattcagtgtttcacaccgccaaagtacgaatttgcccgtagagtacaccggtattccagtggaggtggtgaccgatcctaacatcttgatgggcatgcaaaccagcgtgcacattgcggagctagtgaaggcatgttacccgtcaccagaattagtgagcgctgtaggggtgcacgtgaattggctcaacgaagtcttgctccgagttgtccagaaggaatctcagttgcaagggaccgaggcctacaacgagtgccttgcgcttttaggtcgcattcaatgtgtcatgaagatggggccgtttgtctcggtagtgccgcagctgcaatacagaatgtatggtagcctcatcagacaaatggcccaagtagcacaaaactacgaccaagatttcaggcagctcaagttattcattgcccaaaaccaaatccttggcagctatttgctgcagcagaacaaggcctttgctgacagagaggtgcagatggagagctttcattcagcggtcatttctcaaagaaggcaggagttggacgacgccatcgctaagatggaccgactgagcttgcagatggaggaagaggacagagcaatggagcaagcccgaaaagaaatggaagaaggattgaagcagttccagaatgagcaagttgcaagggctgtgttcgctgttcttaaatctgtagctatgattgcgctcgcattcgtcacggctggtgcaacggctcctggggctgtggcgtcggcggggcaagctgtgagcatagcaggtcaggcggcgcaaggtctgcgaagggtggtggaaattctagaggggctcgaggctgtgatggaggttgtggctgctataaagcaccttgtggatgctctggaccaggtaagtcagattgtggatgcaccacctatgccagacatgccctcggaggcggactggagtatttttgtgaatgagattgaagccgtggcagaggggatgccgacggaagtctcggaggttccggtgtggagggccaagtgcaagaatgtggctgcactgggtcgggagatgagcatcacggcagtacagatgtcggagctgcagtatgacatctgggtgcaaggcatgatgcgggatatggctcgaagccaggcagacaggctggccgcaattcaacccgcggaccttaccaactatttggagatggctacccagatggatatgcggactacgaggatgctgctggggctcctcaacatattgcgcatccagaatgcggcgctcaggtacgagtatcttctaatgcccacggagctcacaacatggccactgagaatggatactgtggccaacttgctcatcacgcacgagagtgctgcactgtcaggattagctcagttagggccctcatctgatttcacgagcaggcatgtggtgaaagacatacctgtgaacttgctgctcgatggcgaggattgggagtttgagattcctgtgcaagctggcatgtccagcttcccttccagctggtctcgcgtccgtattcggcacctggagatgcactttgtgaaggaggccagcggtattggtggtgagattatccaccagcctaccacccagactgggaccgtttacatccttctgcagggctccactgtcttccatgatcgcagaagggaggaggtgatgacctttcaggcagcggttccgctcaactaccattacgcgtaccgcctcgacactggagaagccactcttacgaacgagccctcggaacagtttgccaacacattcatgcagatgacacccttcacccgttggaggcttcgtctgtctgcgtccgcaaaagagaatgcaggattagcctttcccacggctacagcacttgactccactacccagattgtcatcactttccatgttacggccatcagacaaattgactggcggcacgacgaagag

SEQ ID NO: 464 - DNA, 2560 bp, synthetic construct
  misc_feature 1..2560: note = PtIP-83 polypeptide variant encoding polynucleotide
  source 1..2560: mol_type = other DNA
atggattacagcacgctttacagggatctgaaccagataagcatgcccctggatcgggtagagttctcagaggtgatggtaatccacaggatgtacttgaggttatctgatctgaatgtgggggagctccccggagccgagagggtgaagcggttgtatgtgttggcagacgtggtggagctcgcaacatttgcgcatccacagttgcttaatacgcggatgccaggatcggtgacggtgatcattctgtgtcgtcttcttcagtttccaactgatgggtcgttcgctgcttggctcgagctgccgttcatggagttgcacacactcatagaacaatacaggtcagagataaaagcagcagatgacgcgaaatggggaacgtatgtacacgcggaggaagtacagctcagcccgctgtttaatgggtggccttatctggttgttgaggcacagcgctgtattataaccgcggccatgcacaatacatttaaccgccctgggtgggttcgctccattactcaatttacaactgatcagtccggtcgggtagataccacactgctcgcacgaacagaattcggccatattgatctaccactcgaaacagattccccaacggcattcagtgtttcacaccgccaaagtacgaatttgcccgtagagtacaccggtattccagtggaggtggtgactgatcctaacatcttgctgggcatgcagacaacggtacacattgcggagctagtcaaggcatgtcatccgtcacccgatgttgtgagcgctgtaggggtgcacctgaactggctcaacaaactcttactcccacttaaggaatcgactcagttgcaaggaagcgaggcctacaacgagtgccttgcgcttttaggtcgcattcaatgtgtcatgaagatggggccgtttgtctcggtagtgccgcagctgcaatacagaatgtatggtagcctcatcagacaaatggcccaggtagcacagaactacgaccaagatttcaggcagctcaagttattcattgcccaaaaccaaatccttggcagctatttgctgcagcagaacaaggcctttgctgacagagaggtgcagatggagagctttcattcagcggtcatttctcaaagaaggcaggagttggacgacgccatcgctaagatggaccgactgagcttgcagatggaggaagaggacagagcaatggagcaagcccgaaaagaaatggaagaaggattgaagcagttccagaatgagcaagttgcaagggctgtgttcgctgttcttaaatctgtagctatgattgcgctcgcattcgtcacggctggtgcaacggctcctggggctgcagcatctgcagcgcaagctgtgagcatagcaggtcaggcggcgcaaggtctgcgaagggtggtggaaattctagagcagctggaggctgtgatggaggttgtggctgctgtgaaggacctcgtggattcattggaacaggtaggtcagattgtggacgcaccggtgatgccggaattgccctcagaggcggactggtccatttttgtgaacgaggtggaggccgtggcagagggcatgccaacggaagtctcggaggttccggcgtggaaggccaagtgcaagaatgtggctgcactgggtagggagatgtgcatcacggcagaacagatttcccagctccagtatgacatctgggtgcaaggcttgttgcgggatatagctcaaagccacgcagaccggctggcagcgattcaacctgctaatcttaccaactatttggagatggcaatacagatggatatgcggactacgaggatactgatagggctcctcaacataatgcgcatccagaatgcggcacttatgtatgagtaccttctaacgcccacgcagctcactacatggccactgggtatggataccgtgggtgacttgctcatcgtgcaggagaatgctgcactgataggattaatgcagctagggcccccatcggacttcacgagcaggcatgtagtgaaaggcatacctgtgagcttgcttctagacggtggggattgggaatttgagattcctgtgcaaggtggcatgtccagtttcccttccagctggactcgagtgcggattcggcacctggagatgcactttgtgcaggaggccagcggtattggtggtgagattatccaccagcctaccacccagactgggaccgtttacatccttctgcagggctccactgtcttccatgaccgcagaagagaccaggtgttgccttttcaggccgctgctccgctcaactaccattacgcgtaccgcctcgacaccggcgactccactctcacaaacgaaccctctgaacagtttgccaacaagttcatgcagatgacacccttcacccgttggaggcttcgtctgtctgcgtccgcaaaagagaatgcaggattagcctttcccacggctacagcacttgactccactacccagattgtcatcactttccatgttacggccatcagacaaattgactggcggcacgacgaagagtagc

SEQ ID NO: 465 - DNA, 2556 bp, synthetic construct
  misc_feature 1..2556: note = PtIP-83 polypeptide variant encoding polynucleotide
  source 1..2556: mol_type = other DNA
atggattacagcacgctttacagggatctgaaccagataagcatgcccctggatcgggtagagttctcagaggtgatggtaatccacaggatgtacttgaggttatctgatctgaatgtgggggagctccccggagccgagagggtgaagcggttgtatgtgttggcagacgtggtggagctcgcaacatttgcgcatccacagttgcttaatacgcggatgccaggatcggtgacggtgatcattctgtgtcgtcttcttcagtttccaactgatgggtcgttcgctgcttggctcgagctgccgttcatggagttgcacacactcatagaacaatacaggtcagagataaaagcagcagatgacgcgaaatggggaacgtatgtacacgcggaggaagtacagctcagcccgctgtttaatgggtggccttatctggttgttgaggcacagcgctgtattataaccgcggccatgcacaatacatttaaccgccctgggtgggttcgctccattactcaatttacaactgatcagtccggtcgggtagataccacactgctcgcacgaacagaattcggccatattgatctaccactcgaaacagattccccaacggcattcagtgtttcacaccgccaaagtacgaatttgcccgtagagtacaccggtattccagtggaggtggtgaccgatcctaacatcttgatgggcatgcaaaccagcgtgcacattgcggagctagtgaaggcatgttacccgtcaccagaattagtaagcgctgtaggggtgcacgtgaattggctcaacgaagtcttgctccgagttgtccagaaggaatctcagttgcaagggaccgaggcctacaacgagtgccttgcgcttttaggtcgcattcaatgtgtcatgaagatggggccgtttgtctcggtagtgccgcagctgcaatacagaatgtatggtagcctcatcaaccaaatggcccaagtagcacaaaactacgaccgagaattcaagcaattcaaattattcatcatccaaaatcaaatccttggcagctatttgctgcagcagaacagggcatttgctgacagagaggtgcagatggagagctttcattcagcggtcatttctcaaagaagggaggagttggacgacgccatcgctaagatggaccgactgagcttgcagatggaggcagagagtagtgcaatggagcaagccaaaaaggaaatggaagaaggattgaagcagttccagaatgagcaagttgcaagggctgtgttcgctgttcttaaatctgtagctatgattgcgctcgcattcgtcacggctggtgcaacggctcctggggctgcagcatctgcagcgcaagctgtgagcatagcaggtcaggcggcgcaagctctgcgaagggtggtggaaattctagaggggctcgaggctgtgatggaggttgtggctgctgtgaaggacctcgtggatgctctggaccaggtaagtcagattgtggatgcaccacctatgccagacatgccctcggaggcggactggagtatttttgtgaatgagattgaagccgtggcagaggggatgccgacggaagtctcggaggttccggcgtggaaggccaagtgcaagaatgtggctgcactgggtagggagatgtgcatcacggcagaacagatttcccagctccagtatgacatctgggtgcaaggcttgttgcgggatatagctcgaagccaggcagacaggctggccgcaattcaacccgcggaccttaccaactatttggagatggctacccagatggatatgcggactacgaggatgctgctggggctcctcaacatattgcgcatccagaatgcggcgctcaggtacgagtatcttctaatgcccacggagctcacaacatggccactgggtatggataccgtgggtgacttgctcatcgcgcaggagaatgctgcactgataggattaatgcagctagggccctcatctgatttcacgagcaggcatgtggtgaaagacatacctgtgaacttgctgctcgatggcgaggattgggagtttgagattcctgtgcaagctggcatgtccagcttcccttccagctggtctcgcgtccgtattcggcacctggagatgcactttgtgcaggaggcgagcggtggcggcgagattatccaccagcctgccacccagacggggaccatttacatcctcctgcagggctccactgtcttccatgatcgcagaagggaggaggtgatgacctttcaggcagcggttccgctcaactaccattacgcgtaccgcctcgacactggagaagccactcttacgaacgagccctcggaacagtttgccaacacattcatgcagatgacaccgttcactcactggaggctacgtctgtctgcgtccgcagcggagaataaaggattagcctttcccacagctacagctcccgactccaccactgagattgccatcactttccatgttacggccattagacaaattgactggcggcaagaggaggag

SEQ ID NO: 466 - DNA, 2559 bp, synthetic construct
  misc_feature 1..2559: note = PtIP-83 polypeptide variant encoding polynucleotide
  source 1..2559: mol_type = other DNA
atggattacagcacgctttacagggatctgaaccagataagcatgcccctggatcgggtagagttctcagaggtgatggtaatccacaggatgtacttgaggttatctgatctgaatgtgggggagctccccggagccgagagggtgaagcggttgtatgtgttggcagacgtggtggagctcgcaacatttgcgcatccacagttgcttaatacgcggatgccaggatcggtgacggtgatcattctgtgtcgtcttcttcagtttccaactgatgggtcgttcgctgcttggctcgagctgccgttcatggagttgcacacactcatagaacaatacaggtcagagataaaagcagcagatgacgcgaaatggggaacgtatgtacacgcggaggaagtacagctcagcccgctgtttaatgggtggccttatctggttgttgaggcacagcgctgtattataaccgcggccatgcacaatacatttaaccgccctgggtgggttcgctccattactcaatttacaactgatcagtccggtcgggtagataccacactgctcgcacgaacagaattcggccatattgatctaccactcgaaacagattccccaacggcattcagtgtttcacaccgccaaagtacgaatttgcccgtagagtacaccggtattccagtggaggtggtgaccgatcctaacatcttgatgggcatgcaaaccagcgtgcacattgcggagctagtgaaggcatgttacccgtcaccagaattagtgagcgctgtaggggtgcacgtgaattggctcaacgaagtcttgctccgagttgtccagaaggaatctcagttgcaagggaccgaggcctacaacgagtgccttgcgcttttaggtcgcattcaatgtgtcatgaagatggggccgtttgtctcggtagtgccgcagctgcaatacagaatgtatggtagcctcatcagacaaatggcccaggtagcacagaactacgaccaagatttcaggcagctcaagttattcattgcccaaaaccaaatccttggcagctatttgctgcagcagaacaaggcctttgctgacagagaggtgcagatggagagctttcattcagcggtcatttctcaaagaaggcaggagttggacgacgccatcgctaagatggaccgactgagcttgcagatggaggaagaggacagagcaatggagcaagcccgaaaagaaatggaagaaggattgaagcagttccagaatgagcaagttgcaagggctgtgttcgctgttcttaaatctgtagctatgattgcgctcgcattcgtcacggctggtgcaacggctcctggggctgcagcatctgcagcgcaagctgtgaacatagccggtcaagcggcacaagctctgcgaagggtggtggaaattctagaggggctcgaggctgtgatggaggttgtggctgctgtgaaggacctcgtggattcattggaacaggtaggtcagattgtggacgcaccggtgatgccggaattgccctcagaggcggactggagtatttttgtgaatgagattgaagccgtggcagaggggatgccgacggaagtctcggaggttccggcgtggaaggccaagtgcaagaatgtggctgcactgggtagggagatgtgcatcacggcagaacagatttcccagctccagtatgacatctgggtgcaaggcttgttgcgggatatagctcaaagccacgcagaccggctggcagcgattcaacccgcggaccttaccaactatttggagatggctacccagatggatatgcggactacgaggatactgatagggctcctcaacataatgcgcatccagaatgcggcacttatgtatgagtaccttctaacgcccacgcagctcactgcatggccgctgagaatggatactgtggccaacttgctcatcacgcacgagagtgctgcactgtcaggattagctcagttagggcccccatcggacttcacgagcaggcatgtagtgaaaggcatacctgtgagcttgcttctagacggtggggattgggaatttgagattcctgtgcaaggtggcatgtccagtttcccttccagctggtctcgcgtccgtattcggcacctggagatgcactttgtgaaggaggccagcggtattggtggtgagattatccaccagcctaccacccagactgggaccgtttacatccttctgcagggttccactatcttccatgaccgcagaagagaccaggtgttgccttttcaggccgctgctccgctcaactaccattacgcgtaccgcctcgacactggagaagccactcttacgaacgagccctcggaacagtttgccaacacattcatgcagatgacaccgttcactcactggaggctacgtctgtctgcgtccgcagcggagaataaaggattagcctttcccacagctacagctcccgactccaccactgagattgccatcactttccatgttacggccattagacaaattgactggcggcaagaggaggag

SEQ ID NO: 467 - DNA, 2559 bp, synthetic construct; identical to SEQ ID NO: 462
  misc_feature 1..2559: note = PtIP-83 polypeptide variant encoding polynucleotide
  source 1..2559: mol_type = other DNA

SEQ ID NO: 468 - DNA, 2560 bp, synthetic construct
  misc_feature 1..2560: note = PtIP-83 polypeptide variant encoding polynucleotide
  source 1..2560: mol_type = other DNA
atggattacagcacgctttacagggatctgaaccagataagcatgcccctggatcgggtagagttctcagaggtgatggtgatccacaggatgtacttgaggttatctgatctgaatgtgggggagctccccggagccgagagggtgaagcggttgtatgtgttggcagacgtggtggagctcgcaacatttgcgcatccacagttgcttaatacgcggatgccaggatcggtgacggtgatcattctgtgtcgtcttcttcagtttccaactgatgggtcgttcgctgcttggctcgagctgccgttcatggagttgcacacactcatagaacaatacaggtcagagataaaagcagcagatgacgcgaaatggggaacgtatgtacacgcggaggaagtacagctcagcccgctgtttaatgggtggccttatctggttgttgaggcacagcgctgtattataaccgcggccatgcacaatacatttaaccgccctgggtgggttcgctccattactcaatttacaactgatcagtccggtcgggtagataccacactgctcgcacgaacagaattcggccatattgatctaccactcgaaacagattccccaacggcattcagtgtttcacaccgccaaagtacgaatttgcccgtagagtacaccggtattccagtggaggtggtgaccgatcctaacatcttgatgggcatgcaaaccagcgtgcacattgcggagctagtgaaggcatgttacccgtcaccagaattagtgagcgctgtaggggtgcacgtgaattggctcaacgaagtcttgctccgagttgtccagaaggaatctcagttgcaagggaccgaggcctacaacgagtgccttgcgcttttaggtcgcattcaatgtgtcatgaagatggggccgtttgtctcggtagtgccgcagctgcaatacagaatgtatggtagcctcatcagacaaatggcccaggtagcacagaactacgaccaagatttcaggcagctcaagttattcattgcccaaaaccaaatccttggcagctatttgctgcagcagaacagggcctttgctgacagagaggtgcagatggagagctttcattcagcggtcatttctcaaagaaggcaggagttggacaatacattcgcaaagatggaccgattgagcgggcaaatggaggcagagagtagtgcaatggagcaagccaaaaaggaaatggacgaaggattgaggcagttccagaataggcaagttgcgaacgccctctttgccgttcttagcgctgtagctcagattgggcttgcattccttacggctggtgcaacggctcctggagctgtggcgtcggcggggcaagctgtgagcatagcaggtcaggcggcgcaaggtctgcgaagggtggtggaaattctagaggggctcgaggctgtgatggaggttgtggctgctgtgaaggacctcgtggattcattggaacaggtaggtcagattgtggacgcaccggtgatgccggaattgccctcagaggcggactggtccatttttgtgaacgaggtggaagccgtggcagaggggatgccgacggaagtctcggaggttccggcgtggaaggccaagtgcaagaatgtggctgcactgggtagggagatgtgcatcacggcagaacagatttcccagctccagtatgacatctgggtgcaaggcttgttgcgggatatagctcaaagccacgcagaccggctggcagcgattcaacctgctaatcttaccaactatttggagatggcaatacagatggatatgcggactacgaggatactgatagggctcctcaacataatgcgcatccagaatgcggcacttatgtatgagtaccttctaacgcccacgcagctcactgcatggccgctgagaatggataccgtgggtgacttgctcatcacgcaggagaatgctgcactgataggattaatgcagctagggcccccatcggacttcacgagcaggcatgtagtgaaaggcatacctgtgagcttgcttctagacggtggggattgggaatttgagattcctgtgcaaggtggcatgtccagtttcccttccagctggactcgagtgcggattcggcacctggagatgcactttgtgcaggaggcgagcggtggcggcgagattatccaccagcctgccacccagacggggaccatttacatcctcctgcagggctccactgtcttccatgaccgcagaagggaggaggtgatgacctttcaggcagcggttccgctcaactaccattacgcgtaccgcctcgacaccggcgactccactctcacaaacgaaccctctgaacagtttgccaacaagttcatgcagatgacacccttcacccgttggaggcttcgtctgtctgcgtccgcaaaagagaatgcaggattagcctttcccacggctacagcacttgactccactacccagattgtcatcactttccatgttacggccatcagacaagttgactggcggcacgacgaagagtagc

SEQ ID NO: 469 - DNA, 2556 bp, synthetic construct
  misc_feature 1..2556: note = PtIP-83 polypeptide variant encoding polynucleotide
  source 1..2556: mol_type = other DNA
atggattacagcacgctttacagggatctgaaccagataagcatgcccctggatcgggtagagttctcagaggtgatggtaatccacaggatgtacttgaggttatctgatctgaatgtggggcagctcgagggagccgagagggtgaagcggttgtatgtgtttgcggacgtggtggagctcgcaacatttgcgcatccacagttgcttaatacgcggatgccaggatcggtgacggtgatcattctgtgtcgtcttcttcagtttccaactgatgggtcgttcgctgcttggctcgagctgccgttcatggagttgcacacactcatagaacaatacaggtcagagataaaagcagcagatgacgcgaaatggggaacgtatgtacacgcggaggaagtacagctcagcccgctgtttaatgggtggccttatctggttgttgaggcacagcgctgtattataaccgcggccatgcacaatacatttaaccgccctgggtgggttcgctccattactcaatttacaactgatcagtccggtcgggtagataccacactgctcgcacgaacagaattcggccatattgatctaccactcgaaacagattccccaacggcattcagtgtttcacaccgccaaagtacgaatttgcccgtagagtacaccggtattccagtggaggtggtgaccgatcctaacatcttgatgggcatgcaaaccagcgtgcacattgcggagctagtgaaggcatgttacccgtcaccagaattagtgagcgctgtaggggtgcacgtgaattggctcaacgaagtcttgctccgagttgtccagaaggaatctcagttgcaagggaccgaggcctacaacgagtgccttgcgcttttaggtcgcattcaatgtgtcatgaagatggggccgtttgtctcggtagtgccgcagctgcaatacagaatgtatggtagcctcatcagacaaatggcccaggtagcacagaactacgaccaagatttcaggcagctcaagttattcattgcccaaaaccaaatccttggcagctatttgctgcagcagaacaaggcctttgctgacagagaggtgcagatggagagctttcattcagcggtcatttctcaaagaagggaggagttggacaatacattcgcaaagatggaccgactgagcttgcagatggaggcagagagtagtgcaatggagcaagccaaaaaggaaatggacgaaggattgaggcagttccagaataggcaagttgcgaacgccctctttgctgttcttaaatctgtagctatgattgcgctcgcattcgtcacggctggtgcaacggctcctggagctgtggcgtcggcggggcaagctgtgagcatagcaggtcaggcggcgcaaggtctgcgaagggtggtggaaattctagagcagctggaggctgtgatggaggttgtggctgctgtgaaggacctcgtggattcattggaacaggtaggtcagattgtggacgcaccggtgatgccggaattgccctcagaggcggactggtccatttttgtgaacgaggtggaggccgtggcagagggcatgccaacggaagtctcggaggttccggtgtggagggccaagtgcaagaatgtggctgcactgggtcgggagatgagcatcacggcagtacagatttcccagctccagtatgacatctgtgtgcaaggcatgatgcgggatatggctcgaagccaggcagacaggctggccgcaattcaacccgcggaccttaccaactatttggagatggctacccagatggatatgcggactacgaggatactgatagggctcctcaacataatgcgcatccagaatgcggcacttatgtatgagtaccttctaacgcccacgcagctcactgcatggccgctgagaatggatactgtggccaacttgctcatcacgcacgagagtgctgcactgtcaggattagctcagttagggcccccatcggacttcacgagcaggcatgtagtgaaaggcatacctgtgagcttgcttctagacggtggggattgggaatttgagattcctgtgcaaggtggcatgtccagtttcccttccagctggactcgagtgcggattcggcacctggagatgcactttgtgcaggaggcgagcggtggcggcgagattatccaccagcctgccacccagacggggaccgtttacatccttctgcagggttccactgtcttccatgatcgcagaagggaggaggtgatgacctttcaggcagcagttccgctcaactaccattacgcgtaccgcctcgacaccggcgactccactctcacaaacgaaccctctgaacagtttgccaacaagttcatgcagatgacacccttcacccgttggaggcttcgtctgtctgcgtccgcaaaagagaatgcaggattagcctttcccacggctacagcacttgactccactacccagattgtcatcactttccatgttacggccatcagacaaattgactggcggcacgacgaagag

SEQ ID NO: 470 - DNA, 2559 bp, synthetic construct
  misc_feature 1..2559: note = PtIP-83 polypeptide variant encoding polynucleotide
  source 1..2559: mol_type = other DNA
atggattacagcacgctttacagggatctgaaccagataagcatgcccctggatcgggtagagttctcagaggtgatggtaatccacaggatgtacttgaggttatctgatctgaatgtgggggagctccccggagccgagagggtgaagcggttgtatgtgttggcagacgtggtggagctcgcaacatttgcgcatccacagttgcttaatacgcggatgccaggatcggtgacggtgatcattctgtgtcgtcttcttcagtttccaactgatgggtcgttcgctgcttggctcgagctgccgttcatggagttgcacacactcatagaacaatacaggtcagagataaaagcagcagatgacgcgaaatggggaacgtatgtacacgcggaggaagtacagctcagcccgctgtttaatgggtggccttatctggttgttgaggcacagcgctgtattataaccgcggccatgcacaatacatttaaccgccctgggtgggttcgctccattactcaatttacaactgatcagtccggtcgggtagataccacactgctcgcacgaacagaattcggccatattgatctaccactcgaaacagattccccaacggcattcagtgtttcacaccgccaaagtacgaatttgcccgtagagtacaccggtattccagtggaggtggtgaccgatcctaacatcttgatgggcatgcaaaccagcgtgcacattgcggagctagtgaaggcatgttacccgtcaccagaattagtgagcgctgtaggggtgcacgtgaattggctcaacgaagtcttgctccgagttgtccagaaggaatctcagttgcaagggaccgaggcctacaacgagtgccttgcgcttttaggtcgcattcaatgtgtcatgaagatggggccgtttgtctcggtagtgccgcagctgcaatacagaatgtatggtagcctcatcagacaaatggcccaggtagcacagaactacgaccaagatttcaggcagctcaagttattcattgcccaaaaccaaatccttggcagctatttgctgcagcagaacaaggcctttgctgacagagaggtgcagatggagagctttcattcagcggtcatttctcaaagaaggcaggagttggacgacgccatcgctaagatggaccgactgagcttgcagatggaggaagaggacagagcaatggagcaagccaaaaaggaaatggacgaaggattgaagcagttccagaatgagcaagttgcaagggctgtgttcgctgttcttaaatctgtagctatgattgcgctcgcattcgtcacggctggtgcaacggctcctggggctgtggcgtcggcggggcaagctgtgagcatagcaggtcaggcggcgcaaggtctgcgaagggtggtggaaattctagaggggctcgaggctgtgatggaggttgtggctgctataaagcaccttgtggatgctctggaccaggtaagtcagattgtggatgcaccacctatgccagacatgccctcggaggcggactggtccatttttgtgaacgaggtggaggccgtggcagagggcatgccaacggaagtctcggaggttccggtgtggagggccaagtgcaagaatgtggctgcactgggtcgggagatgagcatcacggcagtacagatgtcggagctgcagtatgacatctgggtgcaaggcatgatgcgggatatggctcgaagccagacagacaggctggccgcaattcaacccgcggaccttaccaactatttggagatggctacccagatggatatgcggactacgaggatgctgctggggctcctcaacatattgcgcatccagaatgcggcgctcaggtacgagtatcttctaatgcccacggagctcacaacatggccactgggtatggataccgtgggtgacttgctcatcgcgcaggagaatgctgcactgataggattaatgcagctagggccctcatctgatttcacgagcaggcatgtggtgaaagacatacctgtgaacttgctgctcgatggcgaggattgggagtttgagattcctgtgcaagctggcatgtccagcttcccttccagctggtctcgcgtccgtattcggcacctggagatgcactttgtgaaggaggccagcggtattggtggtgagattatccaccagcctaccacccagactgggaccgtttacatccttctgcagggttccactatcttccatgaccgcagaagagaccaggtgttgccttttcaggccgctgctccgctcaactaccattacgcgtaccgcctcgacaccggcgactccactctcacaaacgaaccctctgaacagtttgccaacaagttcatgcagatgacacccttcacccgttggaggcttcgtctgtctgcgtccgcaaaagagaatgcaggattagcctttcccacggctacagcacttgactccactacccagattgtcatcactttccatgttacggccatcagacaaattgactggcggcacgacgaagag

SEQ ID NO: 471 - DNA, 2559 bp, synthetic construct
  misc_feature 1..2559: note = PtIP-83 polypeptide variant encoding polynucleotide
  source 1..2559: mol_type = other DNA
atggattacagcacgctttacagggatctgaaccagataagcatgcccctggatcgggtagagttctcagaggtgatggtaatccacaggatgtacttgaggttatctgatctgaatgtgggggagctccccggagccgagagggtgaagcggttgtatgtgttggcagacgtggtggagctcgcaacatttgcgcatccacagttgcttaatacgcggatgccaggatcggtgacggtgatcattctgtgtcgtcttcttcagtttccaactgatgggtcgttcgctgcttggctcgagctgccgttcatggagttgcacacactcatagaacaatacaggtcagagataaaagcagcagatgacgcgaaatggggaacgtatgtacacgcggaggaagtacagctcagcccgctgtttaatgggtggccttatctggttgttgaggcacagcgctgtattataaccgcggccatgcacaatacatttaaccgccctgggtgggttcgctccattactcaatttacaactgatcagtccggtcgggtagataccacactgctcgcacgaacagaattcggccatattgatctaccactcgaaacagattccccaacggcattcagtgtttcacaccgccaaagtacgaatttgcccgtagagtacaccggtattccagtggaggtggtgaccgatcctaacatcttgatgggcatgcaaaccagcgtgcacattgcggagctagtgaaggcatgttacccgtcaccagaattagtgagcgctgtaggggtgcacgtgaattggctcaacgaagtcttgctccgagttgtccagaaggaatctcagttgcaagggaccgaggcctacaacgagtgccttgcgcttttaggtcgcattcaatgtgtcatgaagatggggccgtttgtctcggtagtgccgcagctgcaatacagaatgtatggtagcctcatcagacaaatggcccaggtagcacagaactacgaccaagaattcaagcaattcaaattattcatcatccaaaatcaaatccttggcagctatttgctgcagcagaacagggcatttgctgagagggagctacagatggagagctttcatgctgctgtcatttctcaaagaagggaggagttggacaatacattcgcaaagatggaccgattgagcgggcaaatggaggcagagagtagtgcaatggagcaagccaaaaaggaaatggacgaaggattgaggcagttccagaataggcaagttgcgaacgccctctttgccgttcttagcgctgtagctcagattgggctcgcattcgtcacggctggtgcaacggctcctggagctgtggcgtcggcggggcaagctgtgagcatagcaggtcaggcggcgcaaggtctgcgaagggtggtggaaattctagagcagctggaggctgtgatggaggttgtggctgctataaagcaccttgtggatgctctggaccaggtaagtcagattgtggatgcaccacctatgccagacatgccctcggaggcggactggagtatttttgtgaatgagattgaagccgtggcagagggcatgccaacggaagtctcggaggttccggtgtggaaggccaagtgcaagaatgtggctgcactgggtagggagatgtgcatcacggcagtacagatgtcggagctgcagtatgacatctgggtgcaaggcttgttgcgggatatagctcaaagccacgcagaccggctggcagcgattcaacctgctaatcttaccaactatttggagatggcaatacagatggatatgcggactacgaggatactgatagggctcctcaacataatgcgcatccagaatgcggcacttatgtatgagtaccttctaacgcccacgcagctcactgcatggccgctgagaatggatactgtggccaacttgctcatcacgcacgagagtgctgcactgtcaggattagctcagttagggccctcatctgatttcacgagcaggcatgtggtgaaagacatacctgtgaacttgctgctcgatggcgaggattgggagtttgagattcctgtgcaagctggcatgtccagcttcccttccagctggtctcgcgtccgtattcggcacctggagatgcactttgtgaaggaggccagcggtattggtggtgagattatccaccagcctaccacccagactgggaccgtttacatccttctgcagggttccactatcttccatgaccgcagaagagaccaggtgttgccttttcaggccgctgctccgctcaactaccattacgcgtaccgcctcgacactggagaagccactcttacgaacgagccctcggaacagtttgccaacacattcatgcagatgacaccgttcactcactggaggctacgtctgtctgcgtccgcagcggagaataaaggattagcctttcccacggctacagcacttgactccactacccagattgtcatcactttccatgttacggccatcagacaaattgactggcggcaagaggaggag

SEQ ID NO: 472 - DNA, 2556 bp, synthetic construct
  misc_feature 1..2556: note = PtIP-83 polypeptide variant encoding polynucleotide
  source 1..2556: mol_type = other DNA
atggattacagcacgctttacagggatctgaaccagataagcatgcccctggatcgggtagagttctcagaggtgatggtaatccacaggatgtacttgaggttatctgatctgaatgtggggcagctcgagggagccgagaaagtgaagcggttgtatgtgttggcagacgtggtggagctcgcaacatttgcgcatccacagttgcttaatacgcggatgccaggatcggtgacggtgatcattctgtgtcgtcttcttcagtttccaactgatgggtcgttcgctgcttggctcgagctgccgttcatggagttgcacacactcatagaacaatacaggtcagagataaaagcagcagatgacgcgaaatggggaacgtatgtacacgcggaggaagtacagctcagcccgctgtttaatgggtggccttatctggttgttgaggcacagcgctgtattataaccgcggccatgcacaatacatttaaccgccctgggtgggttcgctccattactcaatttacaactgatcagtccggtcgggtagataccacactgctcgcacgaacagaattcggccatattgatctaccactcgaaacagattccccaacggcattcagtgtttcacaccgccaaagtacgaatttgcccgtagagtacaccggtattccagtggaggtggtgaccgatcctaacatcttgatgggcatgcaaaccagcgtacacattgcggagctagtgaaggcatgttacccgtcaccagaattagtgagcgctgtaggggtgcacgtgaattggctcaacgaagtcttgctccgagttgtccagaaggaatctcagttgcaagggaccgaggcctacaacgagtgccttgcgcttttaggtcgcattcaatgtgtcatgaagatggggccgtttgtctcggtagtgccgcagctgcaatacagaatgtatggtagcctcatcagacaaatggcccaggtagcacagaactacgaccaagatttcaggcagctcaagttattcattgcccaaaaccaaatccttggcagctatttgctgcagcagaacaaggcctttgctgacagagaggtgcagatggagagctttcattcagcggtcatttctcaaagaagggaggagttggacgacgccatcgctaagatggaccgactgagcttgcagatggaggaagaggacagagcaatggagcaagcccgaaaagaaatggaagaaggattgaagcagttccagaatgagcaagttgcaagggctgtgttcgctgttcttaaatctgtagctatgattgcgctcgcattcgtcacggctggtgcaacggctcctggggctgcagcatctgcagcgcaagctgtgaacatagccggtcaagcggcacaagctctgcgaagggtggtggaaattctagagcagctggaggctgtgatggaggttgtggctgctgtgaaggacctcgtggattcattggaacaggtaggtcagattgtggacgcaccggtgatgccggaattgccctcagaggcggactggtccatttttgtgaacgaggtggaggccgtggcagaggggatgccgacggaagtctcggaggttccggcgtggaaggccaagtgcaagaatgtggctgcactgggtcgggagatgagcatcacggcagaacagatttcccagctccagtatgacatctgggtgcaaggcttgttgcgggatatggctcgaagccaggcagacaggctggccgcaattcaacccgcggaccttaccaactatttggagatggctacccagatggatatgcggactacgaggatgctgctggggctcctcaacatattgcgcatccagaatgcggcgctcaggtacgagtatcttctaatgcccacggagctcacaacatggccactgggtatggataccgtgggtgacttgctcatcgcgcaggagaatgctgcactgataggattaatgcagctagggccctcatctgatttcacgagcaggcatgtggtgaaagacatacctgtgagcttgcttctagacggtggggattgggaatttgagattcctgtgcaaggtggcatgtccagtttcccttccagctggactcgagtgcggattcggcacctggagatgcactttgtgcaggaggcgagcggtggcggcgagattatccaccagcctgccacccagacggggaccatttacatcctcctgcagggctccactgtcttccatgatcgcagaagggaggaggtgatgacctttcaggcagcggttccgctcaactaccattacgcgtaccgcctcgacactggagaagccactcttacgaacgagccctcggaacagtttgccaacaagttcatgcagatgacacccttcacccgttggaggcttcgtctgtctgcgtccgcagcggagaataaaggattagcctttcccacagctacagctcccgactccaccactgagattgccatcactttccatgttacggccattagacaaattgactggcggcaagaggaggag

SEQ ID NO: 473 - DNA, 2605 bp, synthetic construct
  misc_feature 1..2605: note = PtIP-83 polypeptide variant encoding polynucleotide
  source 1..2605: mol_type = other DNA
atggctctcgtggattacggcaagcttttcgaggatctgaaccagataagcatgggtgtactggatcgggtagagttttcagaggtgatggtgatccacaggatgtatgtgaggctagctgatctgaatgtggggcagctcgagggagccgagaaagtgaagcggttgtatgtgtttgcggacgtggtggagctaccagtcgtggaatggcggtggccgccgcaaataccaggatcggtgacggtgatcatattgtgtcgtcttcttcaatggccaactgatgggaggcagtcggacaccgagctccacctgacattcatgaagttgcatgccatacaacgagaggaaaatcggtgggagataaccgcagcagatggcatgaactggggagtttacatacacgcagaggaagtacaggttggcgtgctgacaatgtcatggtcttcggtacttagagtttcggcacttcgctctgttataacctccggctttcgcgccgttagtgtgtttgaggtaccgggaagtgtaaggtccacccttggagctactttaaggcccgatcacgccttatatagtacaactatgcaagccacacccaacgcatcgcatattagtgcttttaaccttcgcatagtttccccgtcggcatatcgtgtttgtcctctccaaaatgacacagatacctacttaggtattccagcagacgtggcggcagttcttccagtagacgtggtgactgatcctaacatcttgctgggcatgcagacaacggtacacattgcggagctagtcaaggcatgtcatccgtcacccgatgttgtgagcgctgtaggggagcacctgaactggctcaacaaactcttactcccacttaaggaatcgactcagttgcaaggaagcgagtcgtacaaggagtgccttgcactcttgggtcgtgttcacgctgcgatgaagatggtgagaattggcttagtagtgccccagctgcaatacagaatgtacggtagcctcatcaaccaaatggcccaagtagcacaaaactacgaccgagaattcaagcaattcaaattattcatcatccaaaatcaaatccttggcagctatttgctgcagcagaacagggcatttgctgagagggagctgcagatggagagctttcatgctgctgtcatttctcaaagaaggcaggagttggacgacgccatcgctaagatggaccgactgagcgggcaaatggaggcagagagtagtgcaatggagcaagccaaaaaggaaatggacgaaggattgaggcagttccagaataggcaagttgcgaacgccctctttgccgttcttagcgctgtagctcagattgggcttgcattccttacggctggtgcaacggctcctggagctgtggcgtcggcggggcaagctgtgagcatagcaggtcaggcggcgcaaggtctgcgaagggtggtggaaattctagaggggctcgaggctgtgatggaggttgtggctgctgtgaaggacctcgtggattcattggaacaggtaggtcagattgtggacgcaccggtgatgccggaattgccctcagaggcggactggtccatttttgtgaacgaggtggaggccgtggcagagggcatgccaacggaagtctcggaggttccggtgtggagggccaagtgcaagaatgtggctgcactgggtcgggagatgagcatcacggcagtacagatttcccagctccagtatgacatctgggtgcaaggcatgatgcgggatatggctcgaagtcaggcagacaggctggccgcaattcaacccgcggaccttaccaactatttggagatggctacccagatggatatgcggactacgaggatgctgctggggctcctcaacatattgcgcatccagaatgcggcgctcaggtacgagtatcttctaatgcccacggagctcacaacatggccactgggtatggataccgtgggtgacttgctcatcgcgcaggagaatgctgcactgataggattaatgcagctagggccctcatctgatttcacgagcaggcatgtagtgaaaggcatacctgtgagcttgcttctagacggtggggattgggagtttgagattcctgtgcaagctggcatgtccagcttcccttccagctggtctcgcgtccggattcggcacctggagatgcactttgtgcaggaggccagcggtattggtggtgagattatccaccagcctgccacccagacggggaccgtttacatccttctgcagggttccactatcttccatgaccgcagaagagaccaggtgttgccttttcaggccgctgctccgctcaactaccattacgcgtaccgcctcgacaccggcgactccactctcacaaacgaaccctctgaacagtttgccaacaagttcatgcagatgacacccttcacccgttggaggcttcgtctgtctgcgtccgcaaaagagaatgcaggattagcctttcccacggctacagcacttgactccactacccagattgtcatcactttccatgttacggccattagacaaattgactggcggcacgatgaagagtagc

SEQ ID NO: 474 - DNA, 2605 bp, synthetic construct
  misc_feature 1..2605: note = PtIP-83 polypeptide variant encoding polynucleotide
  source 1..2605: mol_type = other DNA
atggctctcgtggattacggcaagcttttcgaggatctgaaccagataagcatgggtgtactggatcgggtagagttttcagaggtgatggtgatccacaggatgtatgtgaggctagctgatctgaatgtggggcagctcgagggagccgagaaagtgaagcggttgtatgtgtttgcggacgtggtggagctaccagtcgtggaatggcggtggccgccgcaaataccaggatcggtgacggtgatcatattgtgtcgtcttcttcaatggccaactgatgggaggcagtcggacaccgagctccacctgacattcatgaagttgcatgccatacaacgagaggaaaatcggtgggagataaccgcagcagatggcatgaactggggagtttacatacacgcagaggaagtacaggttggcgtgctgacaatgtcatggtcttcggtacttagagtttcggcacttcgctctgttataacctccggctttcgcgccgttagtgtgtttgaggtaccgggaagtgtaaggtccacccttggagctactttaaggcccgatcacgccttatatagtacaactatgcaagccacacccaacgcatcgcatattagtgcttttaaccttcgcatagtttccccgtcggcatatcgtgtttgtcctctccaaaatgacacagatacctacttaggtattccagcagacgtggcggcagttcttccagtagacgtggtgactgatcctaacatcttgctgggcatgcagacaacggtacacattgcggagctagtcaaggcatgtcatccgtcacccgatgttgtgagcgctgtaggggagcacctgaactggctcaacaaactcttactcccacttaaggaatcgactcagttgcaaggaagcgagtcgtacaaggagtgccttgcactcttgggtcgtgttcacgctgcgatgaagatggtgagaattggcttagtagtgccccagctgcaatacagaatgtacggtagcctcatcaaccaaatggcccaagtagcacaaaactacgaccgagaattcaagcaattcaaattattcatcatccaaaatcaaatccttggcagctatttgctgcagcagaacagggcatttgctgagagggagctgcagatggagagctttcatgctgctgtcatttctcaaagaagggaggagttggacaatacattcgcaaagatggaccgactgagcttgcagatggaggaagaggacagagcaatggagcaagccaaaaaggaaatggacgaaggattgaggcagttccagaataggcaagttgcgaacgccctctttgccgttcttagcgctgtagctcagattgggcttgcattccttacggctggtgcaacggctcctggagctgtggcgtcggcggggcaagctgtgagcatagcaggtcaggcggcgcaaggtctgcgaagggtggtggaaattctagaggggctcgaggctgtgatggaggttgtggctgctataaagcaccttgtggattcattggaacaggtaggtcagattgtggacgcaccggtgatgccggaattgccctcagaggcggactggtccatttttgtgaacgaggtggaggccgtggcagagggcatgccaacggaagtctcggaggttccggtgtggaaggccaagtgcaagaatgtggctgcactgggtagggagatgagcatcacggcagtacagatgtcggagctgcagtatgacatctgggtgcaaggcatgatgcgggatatggctcgaagccaggcagacaggctggccgcaattcaacccgcggaccttaccaactatttggagatggctacccagatggatatgcggactacgaggatgctgctggggctcctcaacatattgcgcatccagaatgcggcgctcaggtacgagtatcttctaatgcccacggagctcacaacatggccactgggtatggataccgtgggtgacttgctcatcgcgcaggagaatgctgcactgataggattaatgcagctagggccctcatctgatttcacgagcaggcatgtggtgaaagacatacctgtgaacttgctgctcgatggcgaggattgggagtttgagattcctgtgcaaggtggcatgtccagtttcccttccagctggactcgagtgcggattcggcacctggagatgcactttgtgaaggaggccagcggtattggtggtgagattatccaccagcctgccacccagaccgggaccgtttacatccttctgcagggttccactatcttccatgatcgcagaagggaggaggtgttgccttttcaggccgctgctccgctcaactaccattacgcgtaccgcctcgacactggagaagccactcttacgaacgagccctcggaacagtttgccaacacattcatgcagatgacacccttcacccgttggaggctacgtctgtctgcgtccgcagcggagaataaaggattagcctttcccacagctacagctcccgactccaccactgagattgccatcactttccatgttacggccatcagacaaattgactggcggcaagaggaggagtagc

SEQ ID NO: 475 - DNA, 2602 bp, synthetic construct
  misc_feature 1..2602: note = PtIP-83 polypeptide variant encoding polynucleotide
  source 1..2602: mol_type = other DNA
atggctctcgtggattacggcaagcttttcgaggatctgaaccagataagcatgggtgtactggatcgggtagagttttcagaggtgatggtgatccacaggatgtatgtgaggctagctgatctgaatgtggggcagctcgagggagccgagaaagtgaagcggttgtatgtgtttgcggacgtggtggagctaccagtcgtggaatggcggtggccgccgcaaataccaggatcggtgacggtgatcatattgtgtcgtcttcttcaatggccaactgatgggaggcagtcggacaccgagctccacctgacattcatgaagttgcatgccatacaacgagaggaaaatcggtgggagataaccgcagcagatggcatgaactggggagtttacatacacgcagaggaagtacaggttggcgtgctgacaatgtcatggtcttcggtacttagagtttcggcacttcgctctgttataacctccggctttcgcgccgttagtgtgtttgaggtaccgggaagtgtaaggtccacccttggagctactttaaggcccgatcacgccttatatagtacaactatgcaagccacacccaacgcatcgcatattagtgcttttaaccttcgcatagtttccccgtcggcatatcgtgtttgtcctctccaaaatgacacagatacctacttaggtattccagcagacgtggcggcagttcttccagtagacgtggtgactgatcctaacatcttgctgggcatgcagacaacggtacacattgcggagctagtcaaggcatgtcatccgtcacccgatgttgtgagcgctgtaggggagcacctgaactggctcaacaaactcttactcccacttaaggaatcgactcagttgcaaggaagcgagtcgtacaaggagtgccttgcactcttgggtcgtgttcacgctgcgatgaagatggtgagaattggcttagtagtgccccagctgcaatacagaatgtacggtagcctcatcaaccaaatggcccaagtagcacaaaactacgaccgagaattcaagcaattcaaattattcatcatccaaaatcaaatccttggcagctatttgctgcagcagaacagggcatttgctgagagggagctgcagatggagagctttcattcagcggtcatttctcaaagaagggaggagttggacaatacattcgcaaagatggaccgactgagcttgcagatggaggaagaggacagagcaatggagcaagccaaaaaggaaatggacgaaggattgaggcagttccagaataggcaagttgcgaacgccctctttgccgttcttagcgctgtagctcagattgggcttgcattccttacggctggtgcaacggctcctggggctgtggcgtcggcggggcaagctgtgagcatagcaggtcaggcggcgcaaggtctgcgaagggtggtggaaattctagagcagctggaggctgtgatggaggttgtggctgctgtgaaggacctcgtggattcattggaacaggtaggtcagattgtggacgcaccggtgatgccggaattgccctcagaggcggactggtccatttttgtgaacgaggtggaggccgtggcagaggggatgccgacggaagtctcggaggttccggcgtggaaggccaagtgcaagaatgtggctgcactgggtagggagatgtgcatcacggcagaacagatttcccagctccagtatgacatctgggtgcaaggcatgatgcgggatatggctcgaagccaggcagacaggctggccgcaattcaacccgcggaccttaccaactatttggagatggctacccagatggatatgcggactacgaggatgctgctggggctcctcaacatattgcgcatccagaatgcggcgctcaggtacgagtatcttctaatgcccacggagctcacaacatggccactgggtatggataccgtgggtgacttgctcatcgcgcacgagagtgctgcactgtcaggattagctcagttagggcccccatcggacttcacgagcaggcatgtagtgaaaggcatacctgtgagcttgcttctagacggtggggattgggaatttgagattcctgtgcaaggtggcatgtccagtttcccttccagctggactcgagtgcggattcggcacctggagatgcactttgtgcaggaggcgagcggtggcggcgagattatccaccagcctgccacccagacggggaccatttacatcctcctgcagggctccactgtcttccatgatcgcagaagggaggaggtgatgacctttcaggcagcggttccgctcaactaccattacgcgtaccgcctcgacactggagaagccactcttacgaacgagccctcggaacagtttgccaacacattcatgcagatgacaccgttcactcactggaggcttcgtctgtctgcgtccgcagcggagaataaaggattagcctttcccacagctacagctcccgactccaccactgagattgccatcactttccatgttacggccattagacaaattgactggcggcacgacgaagagtagc

SEQ ID NO: 476 - DNA, 2605 bp, synthetic construct
  misc_feature 1..2605: note = PtIP-83 polypeptide variant encoding polynucleotide
  source 1..2605: mol_type = other DNA
atggctctcgtggattacggcaagcttttcgaggatctgaaccagataagcatgggtgtactggatcgggtagagttttcagaggtgatggtgatccacaggatgtatgtgaggctagctgatctgaatgtggggcagctcgagggagccgagaaagtgaagcggttgtatgtgtttgcggacgtggtggagctaccagtcgtggaatggcggtggccgccgcaaataccaggatcggtgacggtgatcatattgtgtcgtcttcttcaatggccaactgatgggaggcagtcggacaccgagctccacctgacattcatgaagttgcatgccatacaacgagaggaaaatcggtgggagataaccgcagcagatggcatgaactggggagtttacatacacgcagaggaagtacaggttggcgtgctgacaatgtcatggtcttcggtacttagagtttcggcacttcgctctgttataacctccggctttcgcgccgttagtgtgtttgaggtaccgggaagtgtaaggtccacccttggagctactttaaggcccgatcacgccttatatagtacaactatgcaagccacacccaacgcatcgcatattagtgcttttaaccttcgcatagtttccccgtcggcatatcgtgtttgtcctctccaaaatgacacagatacctacttaggtattccagcagacgtggcggcagttcttccagtagacgtggtgactgatcctaacatcttgctgggcatgcagacaacggtacacattgcggagctagtcaaggcatgtcatccgtcacccgatgttgtgagcgctgtaggggagcacctgaactggctcaacaaactcttactcccacttaaggaatcgactcagttgcaaggaagcgagtcgtacaaggagtgccttgcactcttgggtcgtgttcacgctgcgatgaagatggtgagaattggcttagtagtgccccagctgcaatacagaatgtacggtagcctcatcaaccaaatggcccaagtagcacaaaactacgaccgagaattcaagcaattcaaattattcatcatccaaaatcaaatccttggcagctatttgctgcagcagaacagggcatttgctgagagggagctgcagatggagagctttcattcagcggtcatttctcaaagaaggcaggagttggacgacgccatcgctaagatggaccgattgagcgggcaaatggaggcagagagtagtgcaatggagcaagccaaaaaggaaatggacgaaggattgaggcagttccagaataggcaagttgcgaacgccctctttgccgttcttagcgctgtagctatgattgcgctcgcattcgtcacggctggtgcaacggctcctggggctgtggcgtcggcggggcaagctgtgagcatagcaggtcaggcggcgcaaggtctgcgaagggtggtggaaattctagaggggctcgaggctgtgatggaggttgtggctgctgtgaaggacctcgtggattcattggaacaggtaggtcagattgtggacgcaccggtgatgccggaattgccctcagaggcggactggtccatttttgtgaacgaggtggaggccgtggcagaggggatgccgacggaagtctcggaggttccggtgtggaaggccaagtgcaagaatgtggctgcactgggtcgggagatgagcatcacggcagtacagatgtcggagctgcagtatgacatctgggtgcaaggcatgatgcgggatatggctcgaagccacgcagaccggctggcagcgattcaacctgctaatcttaccaactatttggagatggcaatacagatggatatgcggactacgaggatgctgctggggctcctcaacatattgcgcatccagaatgcggcgctcaggtacgagtatcttctaacgcccacggagctcacaacatggccactgggtatggataccgtgggtgacttgctcatcgcgcaggagaatgctgcactgataggattaatgcagctagggcccccatcggacttcacgagcaggcatgtagtgaaaggcatacctgtgagcttgcttctagacggtggggattgggaatttgagattcctgtgcaaggtggcatgtccagtttcccttccagctggtctcgcgtccgtattcggcacctggagatgcactttgtgaaggaggccagcggtattggtggtgagattatccaccagcctaccacccagactgggaccgtttacatccttctgcagggctccactgtcttccatgatcgcagaagggaggaggtgatgacctttcaggcagcggttccgctcaactaccattacgcgtaccgcctcgacaccggcgactccactctcacaaacgaaccctctgaacagtttgccaacaagttcatgcagatgacaccgttcacccgttggaggcttcgtctgtctgcgtccgcaaaagagaatgcaggattagcctttcccacagctacagctcccgactccaccactgagattgtcatcactttccatgttacggccatcagacaaattgactggcggcacgacgaagagtagc

SEQ ID NO: 477 - DNA, 2598 bp, synthetic construct
  misc_feature 1..2598: note = PtIP-83 polypeptide variant encoding polynucleotide
  source 1..2598: mol_type = other DNA
atggctctcgtggattacggcaagcttttcgaggatctgaaccagataagcatgggtgtactggatcgggtagagttttcagaggtgatggtgatccacaggatgtatgtgaggctagctgatctgaatgtggggcagctcgagggagccgagaaagtgaagcggttgtatgtgtttgcggacgtggtggagctaccagtcgtggaatggcggtggccgccgcaaataccaggatcggtgacggtgatcatattgtgtcgtcttcttcaatggccaactgatgggaggcagtcggacaccgagctccacctgacattcatgaagttgcatgccatacaacgagaggaaaatcggtgggagataaccgcagcagatggcatgaactggggagtttacatacacgcagaggaagtacaggttggcgtgctgacaatgtcatggtcttcggtacttagagtttcggcacttcgctctgttataacctccggctttcgcgccgttagtgtgtttgaggtaccgggaagtgtaaggtccacccttggagctactttaaggcccgatcacgccttatatagtacaactatgcaagccacacccaacgcatcgcatattagtgcttttaaccttcgcatagtttccccgtcggcatatcgtgtttgtcctctccaaaatgacacagatacctacttaggtattccagcagacgtggcggcagttcttccagtagacgtggtgactgatcctaacatcttgctgggcatgcagacaacggtacacattgcggagctagtcaaggcatgtcatccgtcacccgatgttgtgagcgctgtaggggagcacctgaactggctcaacaaactcttactcccacttaaggaatcgactcagttgcaaggaagcgagtcgtacaaggagtgccttgcactcttgggtcgtgttcacgctgcgatgaagatggtgagaattggcttagtagtgccccagctgcaatacagaatgtacggtagcctcatcaaccaaatggcccaagtagcacaaaactacgaccgagaattcaagcaattcaaattattcatcatccaaaatcaaatccttggcagctatttgctgcagcagaacagggcatttgctgagagggagctgcagatggagagctttcatgctgctgtcatttctcaaagaaggcaggagttggacgacgccatcgctaagatggaccgactgagcttgcagatggaggcagaggacagagcaatggagcaagccaaaaaggaaatggacgaaggattgaagcagttccagaataggcaagttgcgaacgccctctttgccgttcttagcgctgtagctcagattgggctcgcattcgtcacggctggtgcaacggctcctggagctgtggcgtcggcggggcaagctgtgagcatagcaggtcaggcggcgcaaggtctgcgaagggtggtggagattctagagcagctggaggctgtgatggaggttgtggctgctgtgaaggacctcgtggattcattggaacaggtaggtcagattgtggacgcaccggtgatgccggaattgccctcagaggcggactggtccatttttgtgaacgaggtggaggccgtggcagagggcatgccgacggaagtctcggaggttccggtgtggagggccaagtgcaagaatgtggctgcactgggtcgggagatgagcatcacggcagtacagatgtcggagctgcagtatgacatctgggtgcaaggcttgttgcgggatatagctcaaagccacgcagaccggctggcagcgattcaacccgcggaccttaccaactatttggagatggctacccagatggatatgcggactacgaggatgctgctggggctcctcaacatattgcgcatccagaatgcggcgctcaggtacgagtatcttctaatgcccacggagctcacaacatggccactgggtatggataccgtgggtgacttgctcatcgcgcaggagaatgctgcactgataggattaatgcagctagggccctcatctgatttcacgagcaggcatgtggtgaaagacatacctgtgaacttgctgctcgatggcgaggattgggaatttgagattcctgtgcaaggtggcatgtccagcttcccttccagctggtctcgcgtccgtattcggcacctggagatgcactttgtgcaggaggcgagcggtggcggcgagattatccaccagcctgccacccagacggggaccattcacatcctcctgcagggctccactgtcttccatgaccgcagaagagaccaggtgttgccttttcaggccgctgctccgctcaactaccattacgcgtaccgcctcgacactggagaagccactcttacgaacgaaccctctgaacagtttgccaacaagttcatgcagatgacacccttcacccgttggaggcttcgtctgtctgcgtccgcaaaagagaatgcaggattagcctttcccacagctacagctcccgactccaccactgagattgccatcactttccatgttacggccattagacaaattgactggcggcaagaggaggag

SEQ ID NO: 478 - DNA, 2598 bp, synthetic construct
  misc_feature 1..2598: note = PtIP-83 polypeptide variant encoding polynucleotide
  source 1..2598: mol_type = other DNA
atggctctcgtggattacggcaagcttttcgaggatctgaaccagataagcatgggtgtactggatcgggtagagttttcagaggtgatggtgatccacaggatgtatgtgaggctagctgatctgaatgtggggcagctcgagggagccgagaaagtgaagcggttgtatgtgtttgcggacgtggtggagctaccagtcgtggaatggcggtggccgccgcaaataccaggatcggtgacggtgatcatattgtgtcgtcttcttcaatggccaactgatgggaggcagtcggacaccgagctccacctgacattcatgaagttgcatgccatacaacgagaggaaaatcggtgggagataaccgcagcagatggcatgaactggggagtttacatacacgcagaggaagtacaggttggcgtgctgacaatgtcatggtcttcggtacttagagtttcggcacttcgctctgttataacctccggctttcgcgccgttagtgtgtttgaggtaccgggaagtgtaaggtccacccttggagctactttaaggcccgatcacgccttatatagtacaactatgcaagccacacccaacgcatcgcatattagtgcttttaaccttcgcatagtttccccgtcggcatatcgtgtttgtcctctccaaaatgacacagatacctacttaggtattccagcagacgtggcggcagttcttccagtagacgtggtgactgatcctaacatcttgctgggcatgcagacaacggtacacattgcggagctagtcaaggcatgtcatccgtcacccgatgttgtgagcgctgtaggggagcacctgaactggctcaacaaactcttactcccacttaaggaatcgactcagttgcaaggaagcgagtcgtacaaggagtgccttgcactcttgggtcgtgttcacgctgcgatgaagatggtgagaattggcttagtagtgccccagctgcaatacagaatgtacggtagcctcatcaaccaaatggcccaagtagcacaaaactacgaccgagaattcaagcaattcaaattattcatcatccaaaatcaaatccttggcagctatttgctgcagcagaacagggcatttgctgacagagaggtgcagatggagagctttcatgctgctgtcatttctcaaagaagggaggagttggacaatacattcgcaaagatggaccgattgagcgggcaaatggaggcagagagtagtgcaatggagcaagccaaaaaggaaatggacgaaggattgaggcagttccagaataggcaagttgcgaacgccctctttgccgttcttagcgctgtagctcagattgggcttgcattccttacggctggtgcaacggctcctggagctgtggcgtcggcggggcaagctgtgagcatagcaggtcaggcggcgcaaggtctgcgaagggtggtggaaattctagagcagctggaggctgtgatggaggttgtggctgctgtgaaggacctcgtggattcattggaacaggtaagtcagattgtggatgcaccacctatgccagacatgccctcagaggcggactggtccatttttgtgaacgaggtggaggccgtggcagagggcatgccaacggaagtctcggaggttccggtgtggagggccaagtgcaagaatgtggctgcactgggtcgggagatgagcatcacggcagaacagatttcccagctccagtatgacatctgggtgcaaggcatgatgcgggatatggctcgaagccaggcagacaggctggccgcaattcaacccgcggaccttaccaactatttggagatggctacccagatggatatgcggactacgaggatgctgctggggctcctcaacatattgcgcatccagaatgcggcacttatgtatgagtaccttctaacgcccacgcagctcactgcatggccgctgagaatggatactgtggccaacttgctcatcacgcacgagagtgctgcactgtcaggattagctcagttagggcccccatcggacttcacgagcaggcatgtagtgaaagacatacctgtgaacttgctgctcgatggcgaggattgggagtttgagattcctgtgcaagctggcatgtccagcttcccttccagctggactcgagtgcggattcggcacctggagatgcactttgtgcaggaggcgagcggtggcggcgagattatccaccagcctaccacccagactgggaccgtttacatccttctgcagggttccactatcttccatgatcgcagaagggaggaggtgatgacctttcaggcagcggttccgctcaactaccattacgcgtaccgcctcgacactggagaagccactcttacgaacgagccctcggaacagtttgccaacacattcatgcagatgacaccgttcactcactggaggctacgtctgtctgcgtccgcagcggagaataaaggattagcctttcccacagctacagctcccgactccaccactgagattgccatcactttccatgttacggccattagacaaattgactggcggcaagaggaggag

SEQ ID NO: 479 - DNA, 2602 bp, synthetic construct
  misc_feature 1..2602: note = PtIP-83 polypeptide variant encoding polynucleotide
  source 1..2602: mol_type = other DNA
atggctctcgtggattacggcaagcttttcgaggatctgaaccagataagcatgggtgtactggatcgggtagagttttcagaggtgatggtgatccacaggatgtatgtgaggctagctgatctgaatgtggggcagctcgagggagccgagaaagtgaagcggttgtatgtgtttgcggacgtggtggagctaccagtcgtggaatggcggtggccgccgcaaataccaggatcggtgacggtgatcatattgtgtcgtcttcttcaatggccaactgatgggaggcagtcggacaccgagctccacctgacattcatgaagttgcatgccatacaacgagaggaaaatcggtgggagataaccgcagcagatggcatgaactggggagtttacatacacgcagaggaagtacaggttggcgtgctgacaatgtcatggtcttcggtacttagagtttcggcacttcgctctgttataacctccggctttcgcgccgttagtgtgtttgaggtaccgggaagtgtaaggtccacccttggagctactttaaggcccgatcacgccttatatagtacaactatgcaagccacacccaacgcatcgcatattagtgcttttaaccttcgcatagtttccccgtcggcatatcgtgtttgtcctctccaaaatgacacagatacctacttaggtattccagcagacgtggcggcagttcttccagtagacgtggtgactgatcctaacatcttgctgggcatgcagacaacggtacacattgcggagctagtcaaggcatgtcatccgtcacccgatgttgtgagcgctgtaggggagcacctgaactggctcaacaaactcttactcccacttaaggaatcgactcagttgcaaggaagcgagtcgtacaaggagtgccttgcactcttgggtcgtgttcacgctgcgatgaagatggtgagaattggcttagtagtgccccagctgcaatacagaatgtacggtagcctcatcaaccaaatggcccaagtagcacaaaactacgaccgagaattcaagcaattcaaattattcatcatccaaaatcaaatccttggcagctatttgctgcagcagaacaaggcctttgctgacagagaggtgcagatggagagctttcattcagcggtcatttctcaaagaaggcaggagttggacgacgccatcgctaagatggaccgactgagcgggcaaatggaggcagagagtagtgcaatggagcaagccaaaaaggaaatggacgaaggattgaggcagttccagaataggcaagttgcgaacgccctctttgccgttcttagcgctgtagctcagattgggcttgcattcgtcacggctggtgcaacggctcctggagctgtggcgtcggcggggcaagctgtgagcatagcaggtcaggcggcgcaaggtctgcgaagggtggtggaaattctagaggggctcgaggctgtgatggaggttgtggctgctgtgaaggacctcgtggattcattggaacaggtaggtcagattgtggacgcaccggtgatgccggaattgccctcagaggcggactggtccatttttgtgaacgaggtggaggccgtggcagagggcatgccaacggaagtctcggaggttccggtgtggagggccaagtgcaagaatgtggctgcactgggtagggagatgtgcatcacggcagtacagatgtcggagctgcagtatgacatctgggtgcaaggcttgttgcgggatatggctcgaagccaggcagacaggctggccgcaattcaacccgcggaccttaccaactatttggagatggctacccagatggatatgcggactacgaggatgctgctggggctcctcaacatattgcgcatccagaatgcggcgctcaggtacgagtatcttctaatgcccacggagctcacaacatggccactgggtatggataccgtgggtgacttgctcatcgcgcaggagaatgctgcactgataggattaatgcagctagggccctcatctgatttcacgagcaggcatgtagtgaaaggcatacctgtgagcttgcttctagacggtggggattgggaatttgagattcctgtgcaagctggcatgtccagtttcccttccagctggactcgagtgcggattcggcacctggagatgcactttgtgaaggaggcgagcggtggcggcgagattatccaccagcctgccacccagacggggaccatttacatccttctgcagggttccactatcttccatgaccgcagaagagaccaggtgttgccttttcaggccgctgctccgctcaactaccattacgcgtaccgcctcgacactggagaagccactcttacgaacgagccctctgaacagtttgccaacacattcatgcagatgacacccttcacccgttggaggcttcgtctgtctgcgtccgcagcggagaataaaggattagcctttcccacagctacagctcccgactccaccactgagattgccatcactttccatgttacggccatcagacaaattgactggcggcacgacgaagagtagc

SEQ ID NO: 480 - DNA, 2605 bp, synthetic construct
  misc_feature 1..2605: note = PtIP-83 polypeptide variant encoding polynucleotide
  source 1..2605: mol_type = other DNA
atggctctcgtggattacggcaagcttttcgaggatctgaaccagataagcatgggtgtactggatcgggtagagttttcagaggtgatggtgatccacaggatgtatgtgaggctagctgatctgaatgtggggcagctcgagggagccgagaaagtgaagcggttgtatgtgtttgcggacgtggtggagctaccagtcgtggaatggcggtggccgccgcaaataccaggatcggtgacggtgatcatattgtgtcgtcttcttcaatggccaactgatgggaggcagtcggacaccgagctccacctgacattcatgaagttgcatgccatacaacgagaggaaaatcggtgggagataaccgcagcagatggcatgaactggggagtttacatacacgcagaggaagtacaggttggcgtgctgacaatgtcatggtcttcggtacttagagtttcggcacttcgctctgttataacctccggctttcgcgccgttagtgtgtttgaggtaccgggaagtgtaaggtccacccttggagctactttaaggcccgatcacgccttatatagtacaactatgcaagccacacccaacgcatcgcatattagtgcttttaaccttcgcatagtttccccgtcggcatatcgtgtttgtcctctccaaaatgacacagatacctacttaggtattccagcagacgtggcggcagttcttccagtagacgtggtgactgatcctaacatcttgctgggcatgcagacaacggtacacattgcggagctagtcaaggcatgtcatccgtcacccgatgttgtgagcgctgtaggggagcacctgaactggctcaacaaactcttactcccacttaaggaatcgactcagttgcaaggaagcgagtcgtacaaggagtgccttgcactcttgggtcgtgttcacgctgcgatgaagatggtgagaattggcttagtagtgccccagctgcaatacagaatgtacggtagcctcatcaaccaaatggcccaagtagcacaaaactacgaccgagaattcaagcaattcaaattattcatcatccaaaatcaaatccttggcagctatttgctgcagcagaacagggcatttgctgagagggagctgcagatggagagctttcattctgctgtcatttctcaaagaagggaggagttggacaatacattcgcaaagatggaccgattgagcgggcaaatggaggcagagagtagtgcaatggagcaagccaaaaaggaaatggacgaaggattgaggcagttccagaataggcaagttgcgaacgccctctttgccgttcttagcgctgtagctcagattgggcttgcattccttacggctggtgcaacggctcctggggctgcagcatctgcagcgcaagctgtgaacatagccggtcaagcggcacaagctctgcgaagggtggtggaaattctagaggggctcgaggctgtgatggaggttgtggctgctataaagcaccttgtggatgctctggaccaggtaagtcagattgtggacgcaccggtgatgccggaattgccctcagaggcggactggtccatttttgtgaacgaggtggaggccgtggcagagggcatgccaacggaagtctcggaggttccggcgtggaaggccaagtgcaagaatgtggctgcactgggtagggagatgagcatcacggcagtacagatgtcggagctgcagtatgacatctgggtgcaaggcttgttgcgggatatggctcgaagccaggcagacaggctggccgcgattcaacccgcggaccttaccaactatttggagatggctacccagatggatatgcggactacgaggatgctgctggggctcctcaacatattgcgcatccagaatgcggcgctcaggtacgagtatcttctaatgcccacggagctcacaacatggccactgggtatggataccgtgggtgacttgctcatcacgcacgagagtgctgcactgtcaggattagctcagttagggcccccatcggacttcacgagcaggcatgtggtgaaaggcatacctgtgagcttgctgctcgatggcgaggattgggagtttgagattcctgtgcaagctggcatgtccagtttcccttccagctggtctcgcgtccgtattcggcacctggagatgcactttgtgaaggaggccagcggtattggtggtgagattatccaccagcctaccacccagactgggaccgtttacatcctcctgcagggctccactgtcttccatgatcgcagaagggaggaggtgatgacctttcaggccgctgctccgctcaactaccattacgcgtaccgcctcgacactggagaagccactcttacgaacgagccctcggaacagtttgccaacacattcatgcagatgacacccttcacccgttggaggctacgtctgtctgcgtccgcaaaagagaatgcaggattagcctttcccacagctacagctcccgactccaccactgagattgccatcactttccatgttacggccatcagacaaattgactggcggcacgacgaagagtagc

SEQ ID NO: 481 - DNA, 2598 bp, synthetic construct
  misc_feature 1..2598: note = PtIP-83 polypeptide variant encoding polynucleotide
  source 1..2598: mol_type = other DNA
atggctctcgtggattacggcaagcttttcgaggatctgaaccagataagcatgggtgtactggatcgggtagagttttcagaggtgatggtgatccacaggatgtatgtgaggctagctgatctgaatgtggggcagctcgagggagccgagaaagtgaagcggttgtatgtgtttgcggacgtggtggagctaccagtcgtggaatggcggtggccgccgcaaataccaggatcggtgacggtgatcatattgtgtcgtcttcttcaatggccaactgatgggaggcagtcggacaccgagctccacctgacattcatgaagttgcatgccatacaacgagaggaaaatcggtgggagataaccgcagcagatggcatgaactggggagtttacatacacgcagaggaagtacaggttggcgtgctgacaatgtcatggtcttcggtacttagagtttcggcacttcgctctgttataacctccggctttcgcgccgttagtgtgtttgaggtaccgggaagtgtaaggtccacccttggagctactttaaggcccgatcacgccttatatagtacaactatgcaagccacacccaacgcatcgcatattagtgcttttaaccttcgcatagtttccccgtcggcatatcgtgtttgtcctctccaaaatgacacagatacctacttaggtattccagcagacgtggcggcagttcttccagtagacgtggtgactgatcctaacatcttgctgggcatgcagacaacggtacacattgcggagctagtcaaggcatgtcatccgtcacccgatgttgtgagcgctgtaggggagcacctgaactggctcaacaaactcttactcccacttaaggaatcgactcagttgcaaggaagcgagtcgtacaaggagtgccttgcactcttgggtcgtgttcacgctgcgatgaagatggtgagaattggcttagtagtgccccagctgcaatacagaatgtacggtagcctcatcaaccaaatggcccaagtagcacaaaactacgaccgagaattcaagcaattcaaattattcatcatccaaaatcaaatccttggcagctatttgctgcagcagaacagggcatttgctgagagggagctgcagatggagagctttcatgctgctgtcatttctcaaagaagggaggagttggacgacgccatcgctaagatggaccgactgagcttgcagatggaggaagaggacagagcaatggagcaagccaaaaaggaaatggacgaaggattgaggcagttccagaataggcaagttgcgaacgccctctttgccgttcttagcgctgtagctcagattgggctcgcattcgtcacggctggtgcaacggctcctggagctgtggcgtcggcggggcaagctgtgagcatagcaggtcaggcggcgcaaggtctgcgaagggtggtggaaattctagaggggctcgaggctgtgatggaggttgtggctgctgtgaaggacctcgtggattcattggaacaggtaggtcagattgtggacgcaccggtgatgccagacatgccctcggaggcggactggagtatttttgtgaacgaggtggaggccgtggcagaggggatgccgacggaagtctcggaggttccggtgtggagggccaagtgcaagaatgtggctgcactgggtagggagatgtgcatcacggcagtacagatgtcggagctgcagtatgacatctgggtgcaaggcatgatgcgggatatggctcgaagccaggcagacaggctggccgcaattcaacccgcggaccttaccaactatttggagatggctacccagatggatatgcggactacgaggatgctgctggggctcctcaacataatgcgcatccagaatgcggcacttatgtatgagtaccttctaacgcccacgcagctcactgcatggccgctgagaatggatactgtggccaacttgctcatcacgcaggagaatgctgcactgataggattaatgcagctagggccctcatctgatttcacgagcaggcatgtggtgaaagacatacctgtgaacttgctgctcgatggcgaggattgggagtttgagattcctgtgcaaggtggcatgtccagcttcccttccagctggtctcgcgtccgtattcggcacctggagatgcactttgtgcaggaggcgagcggtggcggcgagattatccaccagcctaccacccagactgggaccgtttacatccttctgcagggttccactatcttccatgaccgcagaagagaccaggtgttgccttttcaggccgctgctccgctcaactaccattacgcgtaccgcctcgacaccggcgactccactctcacaaacgaaccctctgaacagtttgccaacaagttcatgcagatgacacccttcacccgttggaggcttcgtctgtctgcgtccgcagcggagaataaaggattagcctttcccacagctacagctcccgactccaccactgagattgccatcactttccatgttacggccattagacaaattgactggcggcaagaggaggag

SEQ ID NO: 482 - DNA, 2598 bp, synthetic construct
  misc_feature 1..2598: note = PtIP-83 polypeptide variant encoding polynucleotide
  source 1..2598: mol_type = other DNA
atggctctcgtggattacggcaagcttttcgaggatctgaaccagataagcatgggtgtactggatcgggtagagttttcagaggtgatggtgatccacaggatgtatgtgaggctagctgatctgaatgtggggcagctcgagggagccgagaaagtgaagcggttgtatgtgtttgcggacgtggtggagctaccagtcgtggaatggcggtggccgccgcaaataccaggatcggtgacggtgatcatattgtgtcgtcttcttcaatggccaactgatgggaggcagtcggacaccgagctccacctgacattcatgaagttgcatgccatacaacgagaggaaaatcggtgggagataaccgcagcagatggcatgaactggggagtttacatacacgcagaggaagtacaggttggcgtgctgacaatgtcatggtcttcggtacttagagtttcggcacttcgctctgttataacctccggctttcgcgccgttagtgtgtttgaggtaccgggaagtgtaaggtccacccttggagctactttaaggcccgatcacgccttatatagtacaactatgcaagccacacccaacgcatcgcatattagtgcttttaaccttcgcatagtttccccgtcggcatatcgtgtttgtcctctccaaaatgacacagatacctacttaggtattccagcagacgtggcggcagttcttccagtagacgtggtgactgatcctaacatcttgctgggcatgcagacaacggtacacattgcggagctagtcaaggcatgtcatccgtcacccgatgttgtgagcgctgtaggggagcacctgaactggctcaacaaactcttactcccacttaaggaatcgactcagttgcaaggaagcgagtcgtacaaggagtgccttgcactcttgggtcgtgttcacgctgcgatgaagatggtgagaattggcttagtagtgccccagctgcaatacagaatgtacggtagcctcatcaaccaaatggcccaagtagcacaaaactacgaccgagaattcaagcaattcaaattattcatcatccaaaatcaaatccttggcagctatttgctgcagcagaacagggcatttgctgagagggagctgcagatggagagctttcatgctgctgtcatttctcaaagaaggcaggagttggacgacgccatcgctaagatggaccgactgagcttgcagatggaggaagaggacagagcaatggagcaagccaaaaaggaaatggacgaaggattgaggcagttccagaataggcaagttgcgaacgccctctttgccgttcttagcgctgtagctcagattgggcttgcatcccttacggctggtgcaacggctcctggagctgtggcgtcggcggggcaagctgtgagcatagcaggtcaggcggcgcaaggtctgcgaagggtggtggaaattctagaggggctcgaggctgtgatggaggttgtggctgctgtgaaggacctcgtggattcattggaacaggtaggtcagattgtggacgcaccggtgatgccggaattgccctcagaggcggactggtccatttttgtgaacgaggtggaggccgtggcagagggcatgccaacggaagtctcggaggttccggtgtggagggccaagtgcaagaatgtggctgcactgggtagggagatgtgcatcacggcagaacagatgtcggagctgcagtatgacatctgggtgcaaggcatgatgcgggatatggctcgaagccaggcagacaggctggccgcaattcaacccgcggaccttaccaactatttggagatggcaatacagatggatatgcggactacgaggatgctgctggggctcctcaacatattgcgcatccagaatgcggcgctcaggtacgagtatcttctaatgcccacggagctcacaacatggccactgggtatggataccgtgggtgacttgctcatcgcgcaggagaatgctgcactgataggattaatgcagctagggccctcatctgatttcacgagcaggcatgtggtgaaagacatacctgtgaacttgctgctcgatggcgaggattgggagtttgagattcctgtgcaagctggcatgtccagcttcccttccagctggtctcgcgtccgtattcggcacctggagatgcactttgtgcaggaggcgagcggtggcggcgagattatccaccagcctgccacccagacggggaccgtttacatccttctgcagggttccactatcttccatgatcgcagaagggaggaggtgatgacctttcaggcagcggttccgctcaactaccattacgcgtaccgcctcgacaccggcgactccactctcacaaacgaaccctctgaacagtttgccaacaagttcatgcagatgacaccgttcactcgctggaggctacgtctgtctgcgtccgcaaaagagaatgcaggattagcctttcccacagctacagctcccgactccaccactgagattgccatcactttccatgttacggccattagacaaattgactggcggcacgacgaggag

SEQ ID NO: 483 - DNA, 2598 bp, synthetic construct
  misc_feature 1..2598: note = PtIP-83 polypeptide variant encoding polynucleotide
  source 1..2598: mol_type = other DNA
atggctctcgtggattacggcaagcttttcgaggatctgaaccagataagcatgggtgtactggatcgggtagagttttcagaggtgatggtgatccacaggatgtatgtgaggctagctgatctgaatgtggggcagctcgagggagccgagaaagtgaagcggttgtatgtgtttgcggacgtggtggagctaccagtcgtggaatggcggtggccgccgcaaataccaggatcggtgacggtgatcatattgtgtcgtcttcttcaatggccaactgatgggaggcagtcggacaccgagctccacctgacattcatgaagttgcatgccatacaacgagaggaaaatcggtgggagataaccgcagcagatggcatgaactggggagtttacatacacgcagaggaagtacaggttggcgtgctgacaatgtcatggtcttcggtacttagagtttcggcacttcgctctgttataacctccggctttcgcgccgttagtgtgtttgaggtaccgggaagtgtaaggtccacccttggagctactttaaggcccgatcacgccttatatagtacaactatgcaagccacacccaacgcatcgcatattagtgcttttaaccttcgcatagtttccccgtcggcatatcgtgtttgtcctctccaaaatgacacagatacctacttaggtattccagcagacgtggcggcagttcttccagtagacgtggtgactgatcctaacatcttgctgggcatgcagacaacggtacacattgcggagctagtcaaggcatgtcatccgtcacccgatgttgtgagcgctgtaggggagcacctgaactggctcaacaaactcttactcccacttaaggaatcgactcagttgcaaggaagcgagtcgtacaaggagtgccttgcactcttgggtcgtgttcacgctgcgatgaagatggtgagaattggcttagtagtgccccagctgcaatacagaatgtacggtagcctcatcaaccaaatggcccaagtagcacaaaactacgaccgagaattcaagcaattcaaattattcatcatccaaaatcaaatccttggcagctatttgctgcagcagaacagggcatttgctgagagggagctgcagatggagagctttcatgctgctgtcatttctcaaagaaggcaggagttggacgacgccatcgctaagatggaccgactgagcttgcagatggaggaagaggacagagcaatggagcaagcccgaaaagaaatggaagaaggattgaggcagttccagaatgagcaagttgcaagggctgtgttcgctgttcttaaatctgtagctatgattgcgctcgcattcgtcacggctggtgcaacggctcctggagctgtggcgtcggcggggcaagctgtgagcatagcaggtcaggcggcgcaaggtctgcgaagggtggtggaaattctagaggggctcgaggctgtgatggaggttgtggctgctgtgaaggacctcgtggattcattggaacaggtaggtcagattgtggacgcaccggtgatgccggaattgccctcagaggcggactggtccatttttgtgaacgaggtggaggccgtggcagaggggatgccgacggaagtctcggaggttccggcgtggagggccaagtgcaagaatgtggctgcactgggtcgggagatgtgcatcacggcagtacagatgtcggagctgcagtatgacatctgggtgcaaggcatgatgcgggatatggctcgaagccaggcagacaggctggccgcaattcaacccgcggaccttaccaactatttggagatggcaatacagatggatatgcggactacgaggatgctgctggggctcctcaacatattgcgcatccagaatgcggcgctcaggtacgagtatcttctaatgcccacggagctcacaacatggccactgggtatggataccgtgggtgacttgctcatcgcgcacgagagtgctgcactgtcaggattagctcagttagggcccccatcggacttcacgagcaggcatgtagtgaaaggcatacctgtgagcttgcttctagacggtggggattgggaatttgagattcctgtgcaaggtggcatgtccagtttcccttccagctggactcgagtgcggattcggcacctggagatgcactttgtgcaggaggcgagcggtggcggcgagattatccaccagcctgccacccagacggggaccatttacatcctcctgcagggctccactgtcttccatgaccgcagaagagaccaggtgttgccttttcaggccgctgctccgctcaactaccattacgcgtaccgcctcgacaccggcgactccactctcacaaacgaaccctctgaacagtttgccaacaagttcatgcagatgacaccgttcactcactggaggctacgtctgtctgcgtccgcaaaagagaatgcaggattagcctttcccacggctacagcacttgactccactacccagattgtcatcactttccatgttacggccatcagacaaattgactggcggcaagaggaggag

SEQ ID NO: 484 - DNA, 2605 bp, synthetic construct
  misc_feature 1..2605: note = PtIP-83 polypeptide variant encoding polynucleotide
  source 1..2605: mol_type = other DNA
atggctctcgtggattacggcaagcttttcgaggatctgaaccagataagcatgggtgtactggatcgggtagagttttcagaggtgatggtgatccacaggatgtatgtgaggctagctgatctgaatgtggggcagctcgagggagccgagaaagtgaagcggttgtatgtgtttgcggacgtggtggagctaccagtcgtggaatggcggtggccgccgcaaataccaggatcggtgacggtgatcatattgtgtcgtcttcttcaatggccaactgatgggaggcagtcggacaccgagctccacctgacattcatgaagttgcatgccatacaacgagaggaaaatcggtgggagataaccgcagcagatggcatgaactggggagtttacatacacgcagaggaagtacaggttggcgtgctgacaatgtcatggtcttcggtacttagagtttcggcacttcgctctgttataacctccggctttcgcgccgttagtgtgtttgaggtaccgggaagtgtaaggtccacccttggagctactttaaggcccgatcacgccttatatagtacaactatgcaagccacacccaacgcatcgcatattagtgcttttaaccttcgcatagtttccccgtcggcatatcgtgtttgtcctctccaaaatgacacagatacctacttaggtattccagcagacgtggcggcagttcttccagtagacgtggtgactgatcctaacatcttgctgggcatgcagacaacggtacacattgcggagctagtcaaggcatgtcatccgtcacccgatgttgtgagcgctgtaggggagcacctgaactggctcaacaaactcttactcccacttaaggaatcgactcagttgcaaggaagcgagtcgtacaaggagtgccttgcactcttgggtcgtgttcacgctgcgatgaagatggtgagaattggcttagtagtgccccagctgcaatacagaatgtacggtagcctcatcaaccaaatggcccaagtagcacaaaactacgaccgagaattcaagcaattcaaattattcatcatccaaaatcaaatccttggcagctatttgctgcagcagaacagggcatttgctgagagggagctgcagatggagagctttcatgctgctgtcatttctcaaagaaggcaggagttggacaatacattcgcaaagatggaccgattgagcgggcaaatggaggaagaggacagagcaatggagcaagcccgaaaagaaatggaagaaggattgaggcagttccagaataggcaagttgcgaacgccctctttgccgttcttagcgctgtagctcagattgggcttgcattccttacggctggtgcaacggctcctggagctgtggcgtcggcggggcaagctgtgagcatagcaggtcaggcggcgcaaggtctgcgaagggtggtggaaattctagaggggctcgaggctgtgatggaggttgtggctgctgtgaaggacctcgtggattcattggaacaggtaggtcagattgtggacgcaccggtgatgccggaattgccctcagaggcggactggtccatttttgtgaatgagattgaagccgtggcagaggggatgccgacggaagtctcggaggttccggcgtggaaggccaagtgcaagaatgtggctgcactgggtagggagatgagcatcacggcagtacagatgtcggagctgcagtatgacatctgggtgcaaggcatgatgcgggatatggctcgaagccaggcagacaggctggccgcaattcaacccgcggaccttaccaactatttggagatggctacccagatggatatgcggactacgaggatgctgctggggctcctcaacataatgcgcatccagaatgcggcacttatgtatgagtaccttctaacgcccacgcagctcactgcatggccactgggtatggataccgtgggtgacttgctcatcacgcacgagagtgctgcactgtcaggattagctcagttagggcccccatcggacttcacgagcaggcatgtagtgaaaggcatacctgtgagcttgcttctagacggtggggattgggaatttgagattcctgtgcaaggtggcatgtccagtttcccttccagctggtctcgcgtccgtattcggcacctggagatgcactttgtgaaggaggccagcggtattggtggtgagattatccaccagcctgccacccagacggggaccatttacatcctcctgcagggctccactgtcttccatgatcgcagaagagaccaggtgttgccttttcaggccgctgctccgctcaactaccattacgcgtaccgcctcgacactggagaagccactcttacgaacgaaccctctgaacagtttgccaacaagttcatgcagatgacacccttcacccgttggaggcttcgtctgtctgcgtccgcaaaagagaatgcaggattagcctttcccacggctacagcacttgactccactacccagattgtcatcactttccatgttacggccatcagacaaattgactggcggcaagaggaggagtagc

SEQ ID NO: 485 - DNA, 2602 bp, synthetic construct
  misc_feature 1..2602: note = PtIP-83 polypeptide variant encoding polynucleotide
  source 1..2602: mol_type = other DNA
atggctctcgtggattacggcaagcttttcgaggatctgaaccagataagcatgggtgtactggatcgggtagagttttcagaggtgatggtgatccacaggatgtatgtgaggctagctgatctgaatgtggggcagctcgagggagccgagaaagtgaagcggttgtatgtgtttgcggacgtggtggagctaccagtcgtggaatggcggtggccgccgcaaataccaggatcggtgacggtgatcatattgtgtcgtcttcttcaatggccaactgatgggaggcagtcggacaccgagctccacctgacattcatgaagttgcatgccatacaacgagaggaaaatcggtgggagataaccgcagcagatggcatgaactggggagtttacatacacgcagaggaagtacaggttggcgtgctgacaatgtcatggtcttcggtacttagagtttcggcacttcgctctgttataacctccggctttcgcgccgttagtgtgtttgaggtaccgggaagtgtaaggtccacccttggagctactttaaggcccgatcacgccttatatagtacaactatgcaagccacacccaacgcatcgcatattagtgcttttaaccttcgcatagtttccccgtcggcatatcgtgtttgtcctctccaaaatgacacagatacctacttaggtattccagcagacgtggcggcagttcttccagtagacgtggtgactgatcctaacatcttgctgggcatgcagacaacggtacacattgcggagctagtcaaggcatgtcatccgtcacccgatgttgtgagcgctgtaggggagcacctgaactggctcaacaaactcttactcccacttaaggaatcgactcagttgcaaggaagcgagtcgtacaaggagtgccttgcactcttgggtcgtgttcacgctgcgatgaagatggtgagaattggcttagtagtgccccagctgcaatacagaatgtacggtagcctcatcaaccaaatggcccaagtagcacaaaactacgaccgagaattcaagcaattcaaattattcatcatccaaaatcaaatccttggcagctatttgctgcagcagaacagggcatttgctgagagggagctgcagatggagagctttcattcagcggtcatttctcaaagaaggcaggagttggacgacgccatcgctaagatggaccgattgagcgggcaaatggaggcagagagtagtgcaatggagcaagccaaaaaggaaatggacgaaggattgaggcagttccagaataggcaagttgcgaacgccctctttgccgttcttagcgctgtagctcagattgggcttgcactccttacggctggtgcaacggctcctggagctgtggcgtcggcggggcaagctgtgagcatagcaggtcaggcggcgcaaggtctgcgaagggtggtggaaactctagagcagctggaggctgtgatggaggttgtggctgctgtgaaggacctcgtggattcattggaacaggtaggtcagattgtggatgcaccacctatgccagacatgccctcggaggcggactggtccatttttgtgaatgagattgaagccgtggcagaggggatgccgacggaagtctcggaggttccggcgtggaaggccaagtgcaagaatgtggctgcactgggtcgggagatgagcatcacggcagtacagatgtcggagctgcagtatgacatctgggtgcaaggcatgatgcgggatatggctcgaagccaggcagacaggctggccgcaattcaacccgcggaccttaccaactatttggagatggctacccagatggatatgcggactacgaggatgctgctggggctcctcaacatattgcgcatccagaatgcggcgctcaggtacgagtatcttctaatgcccacggagctcacaacatggccactgggtatggataccgtgggtgacttgctcatcgcgcaggagaatgctgcactgataggattaatgcagctagggccctcatctgatttcacgagcaggcatgtggtgaaaggcatacctgtgagcttgcttctagacggtggggattgggaatttgagattcctgtgcaaggtggcatgtccagcttcccttccagctggtctcgcgtccgtattcggcacctggagatgcactttgtgcaggaggcgagcggtggcggcgagattatccaccagcctaccacccagactgggaccgtttacatccttctgcagggttccactatcttccatgaccgcagaagggaggaggtgatgacctttcaggcagcggttccgctcaactaccattacgcgtaccgcctcgacactggagaagccactcttacgaacgagccctcggaacagtttgccaacaagttcatgcagatgacacccttcacccgttggaggcttcgtctgtctgcgtccgcaaaagagaatgcaggattagcctttcccacggctacagcacttgactccactacccagattgtcatcactttccatgttacggccatcagacaaattgactggcggcacgacgaagagtagc

SEQ ID NO: 486 - DNA, 2601 bp, synthetic construct
  misc_feature 1..2601: note = PtIP-83 polypeptide variant encoding polynucleotide
  source 1..2601: mol_type = other DNA
atggctctcgtggattacggcaagcttttcgaggatctgaaccagataagcatgggtgtactggatcgggtagagttttcagaggtgatggtgatccacaggatgtatgtgaggctagctgatctgaatgtggggcagctcgagggagccgagaaagtgaagcggttgtatgtgtttgcggacgtggtggagctaccagtcgtggaatggcggtggccgccgcaaataccaggatcggtgacggtgatcatattgtgtcgtcttcttcaatggccaactgatgggaggcagtcggacaccgagctccacctgacattcatgaagttgcatgccatacaacgagaggaaaatcggtgggagataaccgcagcagatggcatgaactggggagtttacatacacgcagaggaagtacaggttggcgtgctgacaatgtcatggtcttcggtacttagagtttcggcacttcgctctgttataacctccggctttcgcgccgttagtgtgtttgaggtaccgggaagtgtaaggtccacccttggagctactttaaggcccgatcacgccttatatagtacaactatgcaagccacacccaacgcatcgcatattagtgcttttaaccttcgcatagtttccccgtcggcatatcgtgtttgtcctctccaaaatgacacagatacctacttaggtattccagcagacgtggcggcagttcttccagtagacgtggtgactgatcctaacatcttgctgggcatgcagacaacggtacacattgcggagctagtcaaggcatgtcatccgtcacccgatgttgtgagcgctgtaggggagcacctgaactggctcaacaaactcttactcccacttaaggaatcgactcagttgcaaggaagcgagtcgtacaaggagtgccttgcactcttgggtcgtgttcacgctgcgatgaagatggtgagaattggcttagtagtgccccagctgcaatacagaatgtacggtagcctcatcaaccaaatggcccaagtagcacaaaactacgaccgagaattcaagcaattcaaattattcatcatccaaaatcaaatccttggcagctatttgctgcagcagaacagggcatttgctgagagggagctgcagatggagagctttcattctgctgtcatttctcaaagaaggcaggagttggacgacgccatcgctaagatggaccgactgagcttgcagatggaggaagaggacagagcaatggagcaagcccgaaaagaaatggaagaaggattgaggcagttccagaataggcaagttgcgaacgccctctttgccgttcttaaatctgtagctatgattgcgctcgcattcgtcacggctggtgcaacggctcctggggctgtggcgtcggcggggcaagctgtgagcatagcaggtcaggcggcgcaaggtctgcgaagggtggtggaaattctagagcagctggaggctgtgatggaggttgtggctgctgtgaaggacctcgtggattcattggaacaggtaggtcagattgtggacgcaccggtgatgccagacatgccctcggaggcggactggagtatttttgtgaacgaggtggaggccgtggcagagggcatgccaacggaagtctcggaggttccggtgtggagggccaagtgcaagaatgtggctgcactgggtcgggagatgagcatcacggcagtacagatgtcggagctgcagtatgacatctgggtgcaaggcatgatgcgggatatggctcgaagccaggcagacaggctggcagcgattcaacctgctaatcttaccaactatttggagatggctacccagatggatatgcggactacgaggatgctgctggggctcctcaacataatgcgcatccagaatgcggcgctcaggtacgagtatcttctaatgcccacggagctcacaacatggccactgggtatggataccgtgggtgacttgctcatcgcgcaggagaatgctgcactgataggattaatgcagctagggccctcatctgatttcacgagcaggcatgtagtgaaaggcatacctgtgagcttgcttctagacggtggggattgggagtttgagattcctgtgcaaggtggcatgtccagcttcccttccagctggtctcgcgtccgtattcggcacctggagatgcactttgtgcaggaggccagcggtattggtggtgagattatccaccagcctgccacccagacggggaccatttacatcctcctgcagggctccactgtcttccatgatcgcagaagagaccaggtgttgccttttcaggccgctgctccgctcaactaccattacgcgtaccgcctcgacaccggcgactccactctcacaaacgaaccctctgaacagtttgccaacaagttcatgcagatgacacccttcacccgttggaggctacgtctgtctgcgtccgcaaaagagaatgcaggattagcctttcccacggctacagcacttgactccaccactgagattgccatcactttccatgttacggccatcagacaaattgactggcggcaagaggaggag

SEQ ID NO: 487 - DNA, 2598 bp, synthetic construct
  misc_feature 1..2598: note = PtIP-83 polypeptide variant encoding polynucleotide
  source 1..2598: mol_type = other DNA
atggctctcgtggattacggcaagcttttcgaggatctgaaccagataagcatgggtgtactggatcgggtagagttttcagaggtgatggtgatccacaggatgtatgtgaggctagctgatctgaatgtggggcagctcgagggagccgagaaagtgaagcggttgtatgtgtttgcggacgtggtggagctaccagtcgtggaatggcggtggccgccgcaaataccaggatcggtgacggtgatcatattgtgtcgtcttcttcaatggccaactgatgggaggcagtcggacaccgagctccacctgacattcatgaagttgcatgccatacaacgagaggaaaatcggtgggagataaccgcagcagatggcatgaactggggagtttacatacacgcagaggaagtacaggttggcgtgctgacaatgtcatggtcttcggtacttagagtttcggcacttcgctctgttataacctccggctttcgcgccgttagtgtgtttgaggtaccgggaagtgtaaggtccacccttggagctactttaaggcccgatcacgccttatatagtacaactatgcaagccacacccaacgcatcgcatattagtgcttttaaccttcgcatagtttccccgtcggcatatcgtgtttgtcctctccaaaatgacacagatacctacttaggtattccagcagacgtggcggcagttcttccagtagacgtggtgactgatcctaacatcttgctgggcatgcagacaacggtacacattgcggagctagtcaaggcatgtcatccgtcacccgatgttgtgagcgctgtaggggagcacctgaactggctcaacaaactcttactcccacttaaggaatcgactcagttgcaaggaagcgagtcgtacaaggagtgccttgcactcttgggtcgtgttcacgctgcgatgaagatggtgagaattggcttagtagtgccccagctgcaatacagaatgtacggtagcctcatcaaccaaatggcccaagtagcacaaaactacgaccgagaattcaagcaattcaaattattcatcatccaaaatcaaatccttggcagctatttgctgcagcagaacagggcatttgctgagagggagctgcagatggagagctttcatgctgctgtcatttctcaaagaagggaggagttggacaatacattcgcaaagatggaccgattgagcgggcaaatggaggcagagagtagtgcaatggagcaagccaaaaaggaaatggacgaaggattgaggcagttccagaataggcaagttgcgaacgccctctttgccgttcttagcgctgtagctcagattgggcttgcattccttacggctggtgcaacggctcctggggctgcagcatctgcagcgcaagctgtgaacatagccggtcaggcggcgcaaggtctgcgaagggtggtggaaattctagaggggctcgaggctgtgatggaggttgtggctgctgtgaaggacctcgtggattcattggaacaggtaggtcagattgtggacgcaccggtgatgccggaattgccctcagaggcggactggagtatttttgtgaacgaggtggaggccgtggcagaggggatgccgacggaagtctcggaggttccggcgtggaaggccaagtgcaagaatgtggctgcactgggtcgggagatgagcatcacggcagaacagatttcccagctccagtatgacatctgggtgcaaggcatgatgcgggatatggctcgaagccaggcagacaggctggccgcaattcaacccgcggaccttaccaactatttggagatggctacccagatggatatgcggactacgaggatgctgctggggctcctcaacatattgcgcatccagaatgcggcgctcaggtacgagtatcttctaatgcccacggagctcacaacatggccactgggtatggataccgtgggtgacttgctcatcgcgcaggagaatgctgcactgataggattagctcagttagggcccccatcggacttcacgagcaggcatgtagtgaaaggcatacctgtgagcttgcttctagacggtggggattgggaatttgagattcctgtgcaagctggcatgtccagtttcccttccagctggactcgagtgcggattcggcacctggagatgcactttgtgcaggaggcgagcggtggcggcgagattatccaccagcctgccacccagacggggaccatttacatcctcctgcagggctccactgtcttccatgatcgcagaagggaggaggtgatgacctttcaggccgctgctccgctcaactaccattacgcgtaccgcctcgacaccggcgactccactctcacaaacgaaccctctgaacagtttgccaacacattcatgcagatgacaccgttcactcactggaggctacgtctgtctgcgtccgcaaaagagaatgcaggattagcctttcccacggctacagcacttgactccaccactgagattgccatcactttccatgttacggccatcagacaaattgactggcggcaagaggaggag

SEQ ID NO: 488 - DNA, 2605 bp, synthetic construct
  misc_feature 1..2605: note = PtIP-83 polypeptide variant encoding polynucleotide
  source 1..2605: mol_type = other DNA
atggctctcgtggattacggcaagcttttcgaggatctgaaccagataagcatgggtgtactggatcgggtagagttttcagaggtgatggtgatccacaggatgtatgtgaggctagctgatctgaatgtggggcagctcgagggagccgagaaagtgaagcggttgtatgtgtttgcggacgtggtggagctaccagtcgtggaatggcggtggccgccgcaaataccaggatcggtgacggtgatcatattgtgtcgtcttcttcaatggccaactgatgggaggcagtcggacaccgagctccacctgacattcatgaagttgcatgccatacaacgagaggaaaatcggtgggagataaccgcagcagatggcatgaactggggagtttacatacacgcagaggaagtacaggttggcgtgctgacaatgtcatggtcttcggtacttagagtttcggcacttcgctctgttataacctccggctttcgcgccgttagtgtgtttgaggtaccgggaagtgtaaggtccacccttggagctactttaaggcccgatcacgccttatatagtacaactatgcaagccacacccaacgcatcgcatattagtgcttttaaccttcgcatagtttccccgtcggcatatcgtgtttgtcctctccaaaatgacacagatacctacttaggtattccagcagacgtggcggcagttcttccagtagacgtggtgactgatcctaacatcttgctgggcatgcagacaacggtacacattgcggagctagtcaaggcatgtcatccgtcacccgatgttgtgagcgctgtaggggagcacctgaactggctcaacaaactcttactcccacttaaggaatcgactcagttgcaaggaagcgagtcgtacaaggagtgccttgcactcttgggtcgtgttcacgctgcgatgaagatggtgagaattggcttagtagtgccccagctgcaatacagaatgtacggtagcctcatcaaccaaatggcccaagtagcacaaaactacgaccgagaattcaagcaattcaaattattcatcatccaaaatcaaatccttggcagctatttgctgcagcagaacagggcatttgctgagagggagctgcagatggagagctttcattctgctgtcatttctcaaagaagggaggagttggacaatacattcgcaaagatggaccgactgagcgggcaaatggaggcagagagtagtgcaatggagcaagccaaaaaggaaatggacgaaggattgaggcagttccagaataggcaagttgcgaacgccctctttgccgttcttagcgctgtagctcagattgggcttgcattccttacggctggtgcaacggctcctggagctgtggcgtcggcggggcaagctgtgagcatagcaggtcaggcggcgcaaggtctgcgaagggtggtggaaattctagagcagctggaggctgtgatggaggttgtggctgctgtgaaggacctcgtggattcattggaacaggtaggtcagattgtggacgcaccggtgatgccagacatgccctcagaggcggactggtccatttttgtgaacgaggtggaggccgtggcagagggcatgccaacggaagtctcggaggttccggtgtggagggccaagtgcaagaatgtggctgcactgggtcgggagatgagcatcacggcagtacagatgtcggagctgcagtatgacatctgggtgcaaggcttgttgcgggatatagctcaaagccacgcagaccggctggcagcgattcaacctgctaatcttaccaactatttggagatggctacccagatggatatgcggactacgaggatgctgctggggctcctcaacatattgcgcatccagaatgcggcgctcaggtacgagtatcttctaatgcccacggagctcacaacatggccactgggtatggatactgtggccaacttgctcatcacgcacgagagtgctgcactgtcaggattagctcagttagggcccccatcggacttcacgagcaggcatgtagtgaaaggcatacctgtgagcttgcttctagacggtggggattgggaatttgagattcctgtgcaaggtggcatgtccagtttcccttccagctggactcgagtgcggattcggcacctggagatgcactttgtgcaggaggccagcggtattggcggtgagattatccaccagcctaccacccagactgggaccgtttacatccttctgcagggttccactaccttccatgaccgcagaagagaccaggtgttgccttttcaggccgctgctccgctcaactaccattacgcgtaccgcctcgacaccggcgactccactctcacaaacgaaccctctgaacagtttgccaacaagttcatgcagatgacacccttcacccgttggaggcttcgtctgtctgcgtccgcagcggagaataaaggattagcctttcccacagctacagctcccgactccaccactgagattgccatcactttccatgttacggccatcagacaaattgactggcggcacgacgaagagtagc

SEQ ID NO: 489 - DNA, 2605 bp, synthetic construct
  misc_feature 1..2605: note = PtIP-83 polypeptide variant encoding polynucleotide
  source 1..2605: mol_type = other DNA
atggctctcgtggattacggcaagcttttcgaggatctgaaccagataagcatgggtgtactggatcgggtagagttttcagaggtgatggtgatccacaggatgtatgtgaggctagctgatctgaatgtggggcagctcgagggagccgagaaagtgaagcggttgtatgtgtttgcggacgtggtggagctaccagtcgtggaatggcggtggccgccgcaaataccaggatcggtgacggtgatcatattgtgtcgtcttcttcaatggccaactgatgggaggcagtcggacaccgagctccacctgacattcatgaagttgcatgccatacaacgagaggaaaatcggtgggagataaccgcagcagatggcatgaactggggagtttacatacacgcagaggaagtacaggttggcgtgctgacaatgtcatggtcttcggtacttagagtttcggcacttcgctctgttataacctccggctttcgcgccgttagtgtgtttgaggtaccgggaagtgtaaggtccacccttggagctactttaaggcccgatcacgccttatatagtacaactatgcaagccacacccaacgcatcgcatattagtgcttttaaccttcgcatagtttccccgtcggcatatcgtgtttgtcctctccaaaatgacacagatacctacttaggtattccagcagacgtggcggcagttcttccagtagacgtggtgactgatcctaacatcttgctgggcatgcagacaacggtacacattgcggagctagtcaaggcatgtcatccgtcacccgatgttgtgagcgctgtaggggagcacctgaactggctcaacaaactcttactcccacttaaggaatcgactcagttgcaaggaagcgagtcgtacaaggagtgccttgcactcttgggtcgtgttcacgctgcgatgaagatggtgagaattggcttagtagtgccccagctgcaatacagaatgtacggtagcctcatcaaccaaatggcccaagtagcacaaaactacgaccgagaattcaagcaattcaaattattcatcatccaaaatcaaatccttggcagctatttgctgcagcagaacagggcatttgctgagagggagctgcagatggagagctttcattcagcggtcatttctcaaagaaggcaggagttggacgacgccatcgctaagatggaccgactgagcttgcagatggaggaagaggacagagcaatggagcaagcccgaaaagaaatggaagaaggattgaagcagttccagaatgagcaagttgcaagggctgtgttcgctgttcttaaatctgtagctatgattgcgctcgcattcgtcacggctggtgcaacggctcctggagctgtggcgtcggcggggcaagctgtgagcatagcaggtcaggcggcgcaaggtctgcgaagggtggtggaaattctagaggggctcgaggctgtgatggaggttgtggctgctgtgaaggacctcgtggattcattggaacaggtaggtcagattgtggatgcaccacctatgccagacatgccctcggaggcggactggtccatttttgtgaacgaggtggaggccgtggcagagggcatgccaacggaagtctcggaggttccggcgtggaaggccaagtgcaagaatgtggctgcactgggtagggagatgtgcatcacggcagaacagatttcccagctccagtatgacatctgggtgcaaggcatgatgcgggatatggctcgaagccaggcagacaggctggccgcaattcaacccgcggaccttaccaactatttggagatggcaatacagatggatatgcggactacgaggatgctgctggggctcctcaacatattgcgcatccagaatgcggcgctcaggtacgagtatcttctaatgcccacggagctcacaacatggccgctgagaatggatactgtggccaacttgctcatcacgcacgagagtgctgcactgtcaggattagctcagttagggcccccatcggacttcacgagcaggcatgtggtgaaagacatacctgtgaacttgctgctcgatggcgaggattgggagtttgagattcctgtgcaaggtggcatgtccagtttcccttccagctggtctcgcgtccgtattcggcacctggagatgcactttgtgaaggaggccagcggtattggtggcgagattatccaccagcctgccacccagactgggaccgtttacatccttctgcagggctccactgtcttccatgaccgcagaagggaggaggtgatgacctttcaggcagcggttccgctcaactaccattacgcgtaccgcctcgacaccggcgactccactctcacaaacgaaccctctgaacagtttgccaacaagttcatgcagatgacacccttcacccgttggaggcttcgtctgtctgcgtccgcaaaggagaatgcaggattagcctttcccacagctacagctcccgactccaccactgagattgccatcactttccatgttacggccattagacaaattgactggcggcacgacgaagagtagc

SEQ ID NO: 490 - DNA, 2602 bp, synthetic construct
  misc_feature 1..2602: note = PtIP-83 polypeptide variant encoding polynucleotide
  source 1..2602: mol_type = other DNA
atggctctcgtggattacggcaagcttttcgaggatctgaaccagataagcatgggtgtactggatcgggtagagttttcagaggtgatggtgatccacaggatgtatgtgaggctagctgatctgaatgtggggcagctcgagggagccgagaaagtgaagcggttgtatgtgtttgcggacgtggtggagctaccagtcgtggaatggcggtggccgccgcaaataccaggatcggtgacggtgatcatattgtgtcgtcttcttcaatggccaactgatgggaggcagtcggacaccgagctccacctgacattcatgaagttgcatgccatacaacgagaggaaaatcggtgggagataaccgcagcagatggcatgaactggggagtttacatacacgcagaggaagtacaggttggcgtgctgacaatgtcatggtcttcggtacttagagtttcggcacttcgctctgttataacctccggctttcgcgccgttagtgtgtttgaggtaccgggaagtgtaaggtccacccttggagctactttaaggcccgatcacgccttatatagtacaactatgcaagccacacccaacgcatcgcatattagtgcttttaaccttcgcatagtttccccgtcggcatatcgtgtttgtcctctccaaaatgacacagatacctacttaggtattccagcagacgtggcggcagttcttccagtagacgtggtgactgatcctaacatcttgctgggcatgcagacaacggtacacattgcggagctagtcaaggcatgtcatccgtcacccgatgttgtgagcgctgtaggggagcacctgaactggctcaacaaactcttactcccacttaaggaatcgactcagttgcaaggaagcgagtcgtacaaggagtgccttgcactcttgggtcgtgttcacgctgcgatgaagatggtgagaattggcttagtagtgccccagctgcaatacagaatgtacggtagcctcatcaaccaaatggcccaagtagcacaaaactacgaccgagaattcaagcaattcaaattattcatcatccaaaatcaaatccttggcagctatttgctgcagcagaacagggcatttgctgagagggagctgcagatggagagctttcatgctgctgtcatttctcaaagaagggaggagttggacgacgccatcgctaagatggaccgactgagcttgcagatggaggaagaggacagagcaatggagcaagccaaaaaggaaatggacgaaggattgaggcagttccagaataggcaagttgcgaacgccctctttgccgttcttagcgctgtagctcagattgggctcgcattcgtcacggctggtgcaacggctcctggagctgtggcgtcggcggggcaagctgtgagcatagcaggtcaggcggcgcaaggtctgcgaagggtggtggaaattctagaggggctcgaggctgtgatggaggttgtggctgctgtgaaggacctcgtggattcattggaacaggtaggtcagattgtggacgcaccggtgatgccggaattgccctcagaggcggactggtccatttttgtgaacgaggtggaggccgtggcagagggcatgccaacggaagtctcggaggttccggtgtggagggccaagtgcaagaatgtggctgcactgggtcgggagatgtgcatcacggcagaacagatttcccagctccagtatgacatctgggtgcaaggcatgatgcgggatacagctcaaagccacgcagaccggctggcagcgattcaacccgcggaccttaccaactatttggagatggctacccagatggatatgcggactacgaggatgctgctggggctcctcaacatattgcgcatccagaatgcggcgctcaggtacgagtatcttctaatgcccacggagctcacaacatggccactgggtatggataccgtgggtgacttgctcatcgcgcacgagagtgctgcactgtcaggattagctcagttagggcccccatcggacttcacgagcaggcatgtggtgaaagacatacctgtgagcttgctgctcgatggcgaggattgggagtttgagattcctgtgcaagctggcatgtccagcttcccttccagctggtctcgcgtccgtattcggcacctggagatgcactttgtgaaggaggccagcggtggcggcgagattatccaccagcctaccacccagactgggaccgtttacatccttctgcagggctccactgtcttccatgaccgcagaagagaccaggtgttgccttttcaggccgctgctccgctcaactaccattacgcgtaccgcctcgacaccggcgactccactctcacaaacgaaccctctgaacagtttgccaacaagttcatgcagatgacacccttcacccgttggaggcttcgtctgtctgcgtccgcgaaagagaatgcaggattagcctttcccacagctacagctcccgactccaccactgagattgccatcactttccatgttacggccatcagacaaattgactggcggcacgacgaagagtagc

SEQ ID NO: 491 - DNA, 2598 bp, synthetic construct
  misc_feature 1..2598: note = PtIP-83 polypeptide variant encoding polynucleotide
  source 1..2598: mol_type = other DNA
atggctctcgtggattacggcaagcttttcgaggatctgaaccagataagcatgggtgtactggatcgggtagagttttcagaggtgatggtgatccacaggatgtatgtgaggctagctgatctgaatgtggggcagctcgagggagccgagaaagtgaagcggttgtatgtgtttgcggacgtggtggagctaccagtcgtggaatggcggtggccgccgcaaataccaggatcggtgacggtgatcatattgtgtcgtcttcttcaatggccaactgatgggaggcagtcggacaccgagctccacctgacattcatgaagttgcatgccatacaacgagaggaaaatcggtgggagataaccgcagcagatggcatgaactggggagtttacatacacgcagaggaagtacaggttggcgtgctgacaatgtcatggtcttcggtacttagagtttcggcacttcgctctgttataacctccggctttcgcgccgttagtgtgtttgaggtaccgggaagtgtaaggtccacccttggagctactttaaggcccgatcacgccttatatagtacaactatgcaagccacacccaacgcatcgcatattagtgcttttaaccttcgcatagtttccccgtcggcatatcgtgtttgtcctctccaaaatgacacagatacctacttaggtattccagcagacgtggcggcagttcttccagtagacgtggtgactgatcctaacatcttgctgggcatgcagacaacggtacacattgcggagctagtcaaggcatgtcatccgtcacccgatgttgtgagcgctgtaggggagcacctgaactggctcaacaaactcttactcccacttaaggaatcgactcagttgcaaggaagcgagtcgtacaaggagtgccttgcactcttgggtcgtgttcacgctgcgatgaagatggtgagaattggcttagtagtgccccagctgcaatacagaatgtacggtagcctcatcaaccaaatggcccaagtagcacaaaactacgaccgagaattcaagcaattcaaattattcatcatccaaaatcaaatccttggcagctatttgctgcagcagaacagggcatttgctgagagggagctgcagatggagagctttcattcagcggtcatttctcaaagaaggcaggagttggacgacgccatcgctaagatggaccgactgagcttgcagatggaggaagaggacagagcaatggagcaagcccgaaaagaaatggaagaaggattgaagcagttccagaatgagcaagttgcaagggctgtgttcgctgttcttaaatctgtagctatgattgcgctcgcattcgtcacggctggtgcaacggctcctggagctgtggcgtcggcggggcaagctgtgagcatagcaggtcaggcggcgcaaggtctgcgaagggtggtggaaattctagaggggctcgaggctgtgatggaggttgtggctgctgtgaaggacctcgtggattcattggaacaggtaggtcagattgtggacgcaccggtgatgccggaattgccctcagaggcggactggtccatttttgtgaatgagattgaagccgtggcagaggggatgccgacggaagtctcggaggttccggtgtggagggccaagtgcaagaatgtggctgcactgggtagggagatgtgcatcacggcagaacagatttcccagctccagtatgacatctgggtgcaaggcatgatgcgggatatggctcgaagccaggcagacaggctggccgcaattcaacccgcggaccttaccaactatttggagatggctacccagatggatatgcggactacgaggatgctgctggggctcctcaacatattgcgcatccagaatgcggcgctcaggtacgagtatcttctaatgcccacggagctcacaacatggccactgggtatggataccgtgggtgacttgctcatcgcgcacgagagtgctgcactgtcaggattagctcagttagggcccccatcggacttcacgagcaggcatgtagtgaaaggcatacctgtgagcttgctgctcgatggcgaggattgggagtttgagattcctgtgcaaggtggcatgtccagtttcccttccagctggactcgagtgcggattcggcacctggagatgcactttgtgcaggaggcgagcggtggcggcgagattatccaccagcctaccacccagacggggaccatttacatcctcctgcagggctccactgtcttccatgatcgcagaagagaccaggtgttgccttttcaggccgctgctccgctcaactaccattacgcgtaccgcctcgacactggagaagccactctcacaaacgaaccctctgaacagtttgccaacaagttcatgcagacgacaccgttcactcactggaggctacgtctgtctgcgtccgcagcggagaataaaggattagcctttcccacagctacagctcccgactccaccactgagattgccatcactttccatgttacggccattagacaaattgactggcggcaagaggaggag

SEQ ID NO: 492 - DNA, 2598 bp, synthetic construct
  misc_feature 1..2598: note = PtIP-83 polypeptide variant encoding polynucleotide
  source 1..2598: mol_type = other DNA
atggctctcgtggattacggcaagcttttcgaggatctgaaccagataagcatgggtgtactggatcgggtagagttttcagaggtgatggtgatccacaggatgtatgtgaggctagctgatctgaatgtggggcagctcgagggagccgagaaagtgaagcggttgtatgtgtttgcggacgtggtggagctaccagtcgtggaatggcggtggccgccgcaaataccaggatcggtgacggtgatcatattgtgtcgtcttcttcaatggccaactgatgggaggcagtcggacaccgagctccacctgacattcatgaagttgcatgccatacaacgagaggaaaatcggtgggagataaccgcagcagatggcatgaactggggagtttacatacacgcagaggaagtacaggttggcgtgctgacaatgtcatggtcttcggtacttagagtttcggcacttcgctctgttataacctccggctttcgcgccgttagtgtgtttgaggtaccgggaagtgtaaggtccacccttggagctactttaaggcccgatcacgccttatatagtacaactatgcaagccacacccaacgcatcgcatattagtgcttttaaccttcgcatagtttccccgtcggcatatcgtgtttgtcctctccaaaatgacacagatacctacttaggtattccagcagacgtggcggcagttcttccagtagacgtggtgactgatcctaacatcttgctgggcatgcagacaacggtacacattgcggagctagtcaaggcatgtcatccgtcacccgatgttgtgagcgctgtaggggagcacctgaactggctcaacaaactcttactcccacttaaggaatcgactcagttgcaaggaagcgagtcgtacaaggagtgccttgcactcttgggtcgtgttcacgctgcgatgaagatggtgagaattggcttagtagtgccccagctgcaatacagaatgtacggtagcctcatcaaccaaatggcccaagtagcacaaaactacgaccgagaattcaagcaattcaaattattcatcatccaaaatcaaatccttggcagctatttgctgcagcagaacaaggcctttgctgacagagaggtgcagatggagagctttcatgctgctgtcatttctcaaagaaggcaggagttggacgacgccatcgctaagatggaccgactgagcttgcagatggaggaagaggacagagcaatggagcaagcccgaaaagaaatggaagaaggattgaagcagttccagaatgagcaagttgcaagggctgtgttcgctgttcttaaatctgtagctatgattgcgctcgcattcgtcacggctggtgcaacggctcctggagctgtggcgtcggcggggcaagctgtgagcatagcaggtcaggcggcgcaaggtctgcgaagggtggtggaaattctagagcagctggaggctgtgatggaggttgtggctgctgtgaaggacctcgtggattcattggaacaggtaggtcagattgtggacgcaccggtgatgccggaattgccctcagaggcggactggtccatttttgtgaacgaggtggaggccgtggcagagggcatgccaacggaagtctcggaggttccggtgtggagggccaagtgcaagaatgtggctgcactgggtagggagatgtgcatcacggcagaacagatttcccagctccagtatgacatctgggtgcaaggcttgttgcgggatatagctcgaagccaggcagacaggctggccgcaattcaacccgcggaccttaccaactatttggagatggcaatacagatggatatgcggactacgaggatactgatagggctcctcaacataatgcgcatccagaatgcggcacttatgtatgagtaccttctaacgcccacgcagctcactgcatggccgctgagaatggatactgtggccaacttgctcatcacgcacgagagtgctgcactgtcaggattagctcagttagggcccccatcggacttcacgagcaggcatgtagtgaaaggcatacctgtgagcttgcttctagacggtggggattgggaatttgagattcctgtgcaaggtggcatgtccagtttcccttccagctggtctcgcgtccgtattcggcacctggagatgcactttgtgcaggaggcgagcggtggcggcgagattatccaccagcctgccacccagacggggaccatttacatccttctgcagggttccactatcttccatgaccgcagaagagaccaggtgttgccttttcaggccgctgctccgctcaactaccattacgcgtaccgcctcgacaccggcgactccactctcacaaacgaaccctctgaacagtttgccaacaagttcatgcagatgacacccttcacccgttggaggcttcgtctgtctgcgtccgcagcggagaataaaggattagcctttcccacagctacagctcccgactccaccactgagattgccatcactttccatgttacggccattagacaaattgactggcggcaagaggaggag

SEQ ID NO: 493 - DNA, 2602 bp, synthetic construct
  misc_feature 1..2602: note = PtIP-83 polypeptide variant encoding polynucleotide
  source 1..2602: mol_type = other DNA
atggctctcgtggattacggcaagcttttcgaggatctgaaccagataagcatgggtgtactggatcgggtagagttttcagaggtgatggtgatccacaggatgtatgtgaggctagctgatctgaatgtggggcagctcgagggagccgagaaagtgaagcggttgtatgtgtttgcggacgtggtggagctaccagtcgtggaatggcggtggccgccgcaaataccaggatcggtgacggtgatcatattgtgtcgtcttcttcaatggccaactgatgggaggcagtcggacaccgagctccacctgacattcatgaagttgcatgccatacaacgagaggaaaatcggtgggagataaccgcagcagatggcatgaactggggagtttacatacacgcagaggaagtacaggttggcgtgctgacaatgtcatggtcttcggtacttagagtttcggcacttcgctctgttataacctccggctttcgcgccgttagtgtgtttgaggtaccgggaagtgtaaggtccacccttggagctactttaaggcccgatcacgccttatatagtacaactatgcaagccacacccaacgcatcgcatattagtgcttttaaccttcgcatagtttccccgtcggcatatcgtgtttgtcctctccaaaatgacacagatacctacttaggtattccagcagacgtggcggcagttcttccagtagacgtggtgactgatcctaacatcttgctgggcatgcagacaacggtacacattgcggagctagtcaaggcatgtcatccgtcacccgatgttgtgagcgctgtaggggagcacctgaactggctcaacaaactcttactcccacttaaggaatcgactcagttgcaaggaagcgagtcgtacaaggagtgccttgcactcttgggtcgtgttcacgctgcgatgaagatggtgagaattggcttagtagtgccccagctgcaatacagaatgtacggtagcctcatcaaccaaatggcccaagtagcacaaaactacgaccgagaattcaagcaattcaaattattcatcatccaaaatcaaatccttggcagctatttgctgcagcagaacagggcatttgctgagagggagctgcagatggagagctttcattcagcggtcatttctcaaagaaggcaggagttggacgacgccatcgctaagatggaccgactgagcttgcagatggaggcagagagtagtgcaatggagcaagccaaaaaggaaatggacgaaggattgaggcagttccagaataggcaagttgcaagggctgtgttcgctgttcttaaatctgtagctatgattgcgctcgcattcgtcacggctggtgcaacggctcctggagctgtggcgtcggcggggcaagctgtgagcatagcaggtcaggcggcacaagctctgcgaagggtggtggaaattctagagcagctggaggctgtgatggaggttgtggctgctgtgaaggacctcgtggattcattggaacaggtaggtcagattgtggacgcaccggtgatgccggaattgccctcagaggcggactggtccatttttgtgaacgaggtggaggccgtggcagagggcatgccaacggaagtctcggaggttccggcgtggaaggccaagtgcaagaatgtggctgcactgggtcgggagatgagcatcacggcagtacagatgtcggagctgcagtatgacatctgggtgcaaggcatgatgcgggatatggctcgaagccaggcagacaggctggccgcaattcaacccgcggaccttaccaactatttggagatggctacccagatggatatgcggactacgaggatgctgctggggctcctcaacatattgcgcatccagaatgcggcgctcaggtacgagtatcttctaatgcccacggagctcacaacatggccactgggtatggataccgtgggtgacttgctcatcgcgcaggagaatgctgcactgataggattaatgcagctagggccctcatctgatttcacgagcaggcatgtagtgaaaggcatacctgtgagcttgcttctagacggtggggattgggaatttgagattcctgtgcaaggtggcatgtccagtttcccttccagctggtctcgcgtccgtattcggcacctggagatgcactttgtgcaggaggcgagcggtggcggcgagattatccaccagcctgccacccagacggggaccatttacatccttctgcagggttccactatcttccatgaccgcagaagagaccaggtgttgccttttcaggccgctgctccgctcaactaccattacgcgtaccgcctcgacactggagaagccactcttacgaacgagccctcggaacagtttgccaacacattcatgcagatgacaccgttcactcactggaggcttcgtctgtctgcgtccgcaaaagagaatgcaggattagcctttcccacggctacagcacttgactccactacccagattgtcatcactttccatgttacggccgttagacaaattgactggcggcacgacgaagagtagc

SEQ ID NO: 494 - DNA, 2601 bp, synthetic construct
  misc_feature 1..2601: note = PtIP-83 polypeptide variant encoding polynucleotide
  source 1..2601: mol_type = other DNA
atggctctcgtggattacggcaagcttttcgaggatctgaaccagataagcatgggtgtactggatcgggtagagttttcagaggtgatggtgatccacaggatgtatgtgaggctagctgatctgaatgtggggcagctcgagggagccgagaaagtgaagcggttgtatgtgtttgcggacgtggtggagctaccagtcgtggaatggcggtggccgccgcaaataccaggatcggtgacggtgatcatattgtgtcgtcttcttcaatggccaactgatgggaggcagtcggacaccgagctccacctgacattcatgaagttgcatgccatacaacgagaggaaaatcggtgggagataaccgcagcagatggcatgaactggggagtttacatacacgcagaggaagtacaggttggcgtgctgacaatgtcatggtcttcggtacttagagtttcggcacttcgctctgttataacctccggctttcgcgccgttagtgtgtttgaggtaccgggaagtgtaaggtccacccttggagctactttaaggcccgatcacgccttatatagtacaactatgcaagccacacccaacgcatcgcatattagtgcttttaaccttcgcatagtttccccgtcggcatatcgtgtttgtcctctccaaaatgacacagatacctacttaggtattccagcagacgtggcggcagttcttccagtagacgtggtgactgatcctaacatcttgctgggcatgcagacaacggtacacattgcggagctagtcaaggcatgtcatccgtcacccgatgttgtgagcgctgtaggggagcacctgaactggctcaacaaactcttactcccacttaaggaatcgactcagttgcaaggaagcgagtcgtacaaggagtgccttgcactcttgggtcgtgttcacgctgcgatgaagatggtgagaattggcttagtagtgccccagctgcaatacagaatgtacggtagcctcatcaaccaaatggcccaagtagcacaaaactacgaccgagaattcaagcaattcaaattattcatcatccaaaatcaaatccttggcagctatttgctgcagcagaacagggcatttgctgacagagaggtgcagatggagagctttcattcagcggtcatttctcaaagaagggaggagttggacaatacattcgcaaagatggaccgattgagcgggcaaatggaggcagagagtagtgcaatggagcaagccaaaaaggaaatggacgaaggattgaggcagttccagaataggcaagttgcgaacgccctctttgccgttcttagcgctgtagctcagattgggcttgcattccttacggctggtgcaacggctcctggagctgtggcgtcggcggggcaagctgtgagcatagcaggtcaggcggcgcaaggtctgcgaagggtggtggaaattctagagcagctggaggctgtgatggaggttgtggctgctgtgaaggacctcgtggattcattggaacaggtaggtcagattgtggacgcaccggtgatgccggaattgccctcagaggcggactggtccatttttgtgaacgaggtggaggccgtggcagagggcatgccaacggaagtctcggaggttccggtgtggagggccaagtgcaagaatgtggctgcactgggtcgggagatgagcatcacggcagtacagatgtcggagctgcagtatgtcatctgggtgcaaggcatgatgcgggatatggctcgaagccaggcagacaggctggccgcaattcaacccgcggaccttaccaactatttggagatggctacccagatggatatgcggactacgaggatgctgctggggctcctcaacatattgcgcatccagaatgcggcacttatgtatgagtaccttctaacgcccacgcagctcactgcatggccgctgagaatggatactgtggccaacttgctcatcacgcacgagagtgctgcactgtcaggattagctcagttagggcccccatcggacttcacgagcaggcatgtagtgaaaggcatacctgtgagcttgcttctagacggtggggattgggaatttgagattcctgtgcaaggtggcatgtccagcttcccttccagctggtctcgcgtccgtattcggcacctggagatgcactttgtgaaggaggcgagcggtattggtggtgagattatccaccagcctgccacccagactgggaccatttacatcctcctgcagggctccactgtcttccatgatcgcagaagagaccaggtgttgccttttcaggccgctgctccgctcaactaccattacgcgtaccgcctcgacaccggcgactccactctcacaaacgaaccctctgaacagtttgccaacacattcatgcagatgacaccgttcactcactggaggctacgtctgtctgcgtccgcagcggagaataaaggattagcctttcccacagctacagctcccgactccaccactgagattgccatcactttccatgttacggccatcagacaaattgactggcggcaagaggaggag

SEQ ID NO: 495 - DNA, 2602 bp, synthetic construct
  misc_feature 1..2602: note = PtIP-83 polypeptide variant encoding polynucleotide
  source 1..2602: mol_type = other DNA
atggctctcgtggattacggcaagcttttcgaggatctgaaccagataagcatgggtgtactggatcgggtagagttttcagaggtgatggtgatccacaggatgtatgtgaggctagctgatctgaatgtggggcagctcgagggagccgagaaagtgaagcggttgtatgtgtttgcggacgtggtggagctaccagtcgtggaatggcggtggccgccgcaaataccaggatcggtgacggtgatcatattgtgtcgtcttcttcaatggccaactgatgggaggcagtcggacaccgagctccacctgacattcatgaagttgcatgccatacaacgagaggaaaatcggtgggagataaccgcagcagatggcatgaactggggagtttacatacacgcagaggaagtacaggttggcgtgctgacaatgtcatggtcttcggtacttagagtttcggcacttcgctctgttataacctccggctttcgcgccgttagtgtgtttgaggtaccgggaagtgtaaggtccacccttggagctactttaaggcccgatcacgccttatatagtacaactatgcaagccacacccaacgcatcgcatattagtgcttttaaccttcgcatagtttccccgtcggcatatcgtgtttgtcctctccaaaatgacacagatacctacttaggtattccagcagacgtggcggcagttcttccagtagacgtggtgactgatcctaacatcttgctgggcatgcagacaacggtacacattgcggagctagtcaaggcatgtcatccgtcacccgatgttgtgagcgctgtaggggagcacctgaactggctcaacaaactcttactcccacttaaggaatcgactcagttgcaaggaagcgagtcgtacaaggagtgccttgcactcttgggtcgtgttcacgctgcgatgaagatggtgagaattggcttagtagtgccccagctgcaatacagaatgtacggtagcctcatcaaccaaatggcccaagtagcacaaaactacgaccgagaattcaagcaattcaaattattcatcatccaaaatcaaatccttggcagctatttgctgcagcagaacagggcatttgctgagagggagctgcagatggagagctttcatgctgctgtcatttctcaaagaaggcaggagttggacgacgccatcgctaagatggaccgactgagcttgcagatggaggaagaggacagagcaatggagcaagcccgaaaagaaatggaagaaggattgaagcagttccagaatgagcaagttgcaagggctgtgttcgctgttcttaaatctgtagctatgattgcgctcgcattcgtcacggctggtgcaacggctcctggggctgcagcatctgcagcgcaagctgtgagcatagcaggtcaggcggcgcaaggtctgcgaagggtggtggaaattctagaggggctggaggctgtgatggaggttgtggctgctgtgaaggacctcgtggattcattggaacaggtaggtcagattgtggacgcaccggtgatgccggaattgccctcagaggcggactggtccatttttgtgaacgaggtggaggccgtggcagagggcatgccaacggaagtctcggaggttccggtgtggagggccaagtgcaagaatgtggctgcactgggtagggagatgtgcatcacggcagtacagatgtcggagctgcagtatgacatctgggtgcaaggcatgatgcgggatatggctcgaagccaggcagacaggctggccgcaattcaacccgcggaccttaccaactatttggagatggctacccagatggatatgcggactacgaggatgctgctggggctcctcaacatattgcgcatccagaatgcggcgctcaggtacgagtatcttctaatgcccacggagctcacaacatggccactgggtatggataccgtgggtgacttgctcatcgcgcaggagaatgctgcactgataggattaatgcagctagggccctcatctgatttcacgagcaggcatgtagtgaaaggcatacctgtgagcttgcttctagacggtggggattgggaatttgagattcctgtgcaaggtggcatgtccagtttcccttccagctggtctcgagtgcggattcggcacctggagatgcactttgtgcaggaggcgagcggtggcggcgagattatccaccagcctgccacccagacggggaccatttacatcctcctgcagggctccactgtcttccatgatcgcagaagggaggaggtgatgacctttcaggcagcggttccgctcaactaccattacgcgtaccgcctcgacactggagaagccactctcacaaacgaaccctctgaacagtttgccaacacattcatgcagatgacaccgttcactcactggaggctacgtctgtctgcgtccgcaaaagagaatgcaggattagcctttcccacagctacagctcccgactccaccactgagattgccatcactttccatgttacggccattagacaaattgactggcggcacgacgaagagtagc

SEQ ID NO: 496 - DNA, 2598 bp, synthetic construct
  misc_feature 1..2598: note = PtIP-83 polypeptide variant encoding polynucleotide
  source 1..2598: mol_type = other DNA
atggctctcgtggattacggcaagcttttcgaggatctgaaccagataagcatgggtgtactggatcgggtagagttttcagaggtgatggtgatccacaggatgtatgtgaggctagctgatctgaatgtggggcagctcgagggagccgagaaagtgaagcggttgtatgtgtttgcggacgtggtggagctaccagtcgtggaatggcggtggccgccgcaaataccaggatcggtgacggtgatcatattgtgtcgtcttcttcaatggccaactgatgggaggcagtcggacaccgagctccacctgacattcatgaagttgcatgccatacaacgagaggaaaatcggtgggagataaccgcagcagatggcatgaactggggagtttacatacacgcagaggaagtacaggttggcgtgctgacaatgtcatggtcttcggtacttagagtttcggcacttcgctctgttataacctccggctttcgcgccgttagtgtgtttgaggtaccgggaagtgtaaggtccacccttggagctactttaaggcccgatcacgccttatatagtacaactatgcaagccacacccaacgcatcgcatattagtgcttttaaccttcgcatagtttccccgtcggcatatcgtgtttgtcctctccaaaatgacacagatacctacttaggtattccagcagacgtggcggcagttcttccagtagacgtggtgactgatcctaacatcttgctgggcatgcagacaacggtacacattgcggagctagtcaaggcatgtcatccgtcacccgatgttgtgagcgctgtaggggagcacctgaactggctcaacaaactcttactcccacttaaggaatcgactcagttgcaaggaagcgagtcgtacaaggagtgccttgcactcttgggtcgtgttcacgctgcgatgaagatggtgagaattggcttagtagtgccccagctgcaatacagaatgtacggtagcctcatcaaccaaatggcccaagtagcacaaaactacgaccgagaattcaagcaattcaaattattcatcatccaaaatcaaatccttggcagctatttgctgcagcagaacagggcatttgctgagagggagctgcagatggagagctttcattcagcggtcatttctcaaagaagggaggagttggacaatacattcgcaaagatggaccgattgagcgggcaaatggaggcagagagtagtgcaatggagcaagccaaaaaggaaatggacgaaggattgaggcagttccagaataggcaagttgcgaacgccctctttgccgttcttagcgctgtagctcagattgggcttgcattccttacggctggtgcaacggctcctggagctgtggcgtcggcggggcaagctgtgagcatagcaggtcaggcggcgcaaggtctgcgaagggtggtggaaattctagaggggctcgaggctgtgatggaggttgtggctgctataaagcaccttgtggatgctctggaccaggtaagtcagattgtggatgcaccacctatgccagacatgccctcggaggcggactggtccatttttgtgaacgaggtggaggccgtggcagagggcatgccaacggaagtctcggaggttccggcgtggaaggccaagtgcaagaatgtggctgcactgggtcgggagatgtgcatcacggcagaacagatttcccagctccagtatgacatctgggtgcaaggcttgttgcgggatatagctcaaagccaggcagacaggctggccgcaattcaacccgcggaccttaccaactatttggagatggctacccagatggatatgcggactacgaggatgctgctggggctcctcaacatattgcgcatccagaatgcggcgctcaggtacgagtaccttctaacgcccacgcagctcactgcatggccgctgagaatggatactgtggccaacttgctcatcacgcacgagagtgctgcactgtcaggattagctcagttagggcccccatcggacttcacgagcaggcatgtggtgaaagacatacctgtgaacttgctgctcgatggcgaggattgggagtttgagattcctgtgcaaggtggcatgtccagtttcccttccagctggactcgagtgcggattcggcacctggagatgcactttgtgcaggaggcgagcggtggcggcgagattatccaccagcctgccacccagacggggaccatttacatcctcctgcagggttccactatcttccatgaccgcagaagggaggaggtgatgacctttcaggcagcggttccgctcaactaccattacgcgtaccgcctcgacaccggcgactccactctcacaaacgaaccctctgaacagtttgccaacacattcatgcagatgacacccttcacccgttggaggcttcgtctgtctgcgtccgcaaaagagaatgcaggattagcctttcccacagctacagctcccgactccaccactgagattgccatcactttccatgttacggccatcagacaaattgactggcggcaagaggaggag

SEQ ID NO: 497 - DNA, 2601 bp, synthetic construct
  misc_feature 1..2601: note = PtIP-83 polypeptide variant encoding polynucleotide
  source 1..2601: mol_type = other DNA
atggctctcgtggattacggcaagcttttcgaggatctgaaccagataagcatgggtgtactggatcgggtagagttttcagaggtgatggtgatccacaggatgtatgtgaggctagctgatctgaatgtggggcagctcgagggagccgagaaagtgaagcggttgtatgtgtttgcggacgtggtggagctaccagtcgtggaatggcggtggccgccgcaaataccaggatcggtgacggtgatcatattgtgtcgtcttcttcaatggccaactgatgggaggcagtcggacaccgagctccacctgacattcatgaagttgcatgccatacaacgagaggaaaatcggtgggagataaccgcagcagatggcatgaactggggagtttacatacacgcagaggaagtacaggttggcgtgctgacaatgtcatggtcttcggtacttagagtttcggcacttcgctctgttataacctccggctttcgcgccgttagtgtgtttgaggtaccgggaagtgtaaggtccacccttggagctactttaaggcccgatcacgccttatatagtacaactatgcaagccacacccaacgcatcgcatattagtgcttttaaccttcgcatagtttccccgtcggcatatcgtgtttgtcctctccaaaatgacacagatacctacttaggtattccagcagacgtggcggcagttcttccagtagacgtggtgactgatcctaacatcttgctgggcatgcagacaacggtacacattgcggagctagtcaaggcatgtcatccgtcacccgatgttgtgagcgctgtaggggagcacctgaactggctcaacaaactcttactcccacttaaggaatcgactcagttgcaaggaagcgagtcgtacaaggagtgccttgcactcttgggtcgtgttcacgctgcgatgaagatggtgagaattggcttagtagtgccccagctgcaatacagaatgtacggtagcctcatcaaccaaatggcccaagtagcacaaaactacgaccgagaattcaagcaattcaaattattcatcatccaaaatcaaatccttggcagctatttgctgcagcagaacagggcatttgctgagagggagctgcagatggagagctttcatgctgctgtcatttctcaaagaagggaggagttggacaatacattcgcaaagatggaccgattgagcgggcaaatggaggaagaggacagagcaatggagcaagccaaaaaggaaatggacgaaggattgaggcagttccagaataggcaagttgcgaacgccctctttgccgttcttagcgctgtagctcagattgggcttgcattccttacggctggtgcaacggctcctggagctgtggtgtcggcggggcaagctgtgagcatagcaggtcaggcggcgcaaggtctgcgaagggtggtggaaattctagagcagctggaggctgtgatggaggttgtggctgctgtgaaggacctcgtggattcattggaacaggtaggtcagattgtggacgcaccggtgatgccggaattgccctcagaggcggactggtccatttttgtgaacgaggtggaggccgtggcagagggcatgccaacggaagtctcggaggttccggcgtggaaggccaagtgcaagaatgtggctgcactgggtagggagatgtgcatcacggcagaacagatttcccagctccagtatgacatctgggtgcaaggcatgatgcgggatatggctcgaagccaggcagacaggctggccgcaattcaacccgcggaccttaccaactatttggagatggctacccagatggatatgcggactacgaggatgctgctggggctcctcaacataatgcgcatccagaatgcggcgctcaggtacgagtatcttctaatgcccacggagctcacaacatggccactgggtatggataccgtgggtgacttgctcatcgcgcaggagaatgctgcactgataggattaatgcagctagggccctcatctgatttcacgagcaggcatgtggtgaaaggcatacctgtgagcttgcttctagacggtggggattgggaatttgagattcctgtgcaaggtggcatgtccagtttcccttccagctggactcgagtgcggattcggcacctggagatgcactttgtgcaggaggccagcggtattggtggtgagattatccaccagcctaccacccagactgggaccgtttacatccttctgcagggttccactatcttccatgaccgcagaagagaccaggtgttgccttttcaggccgctgctccgctcaactaccattacgcgtaccgcctcgacactggagaagccactcttacgaacgagccctcggaacagtttgccaacacattcatgcagatgacacccttcacccgttggaggcttcgtctgtctgcggccgcaaaagagaatgcaggattagcctttcccacggctacagcacttgactccactacccagattgtcatcactttccatgttacggccattagacaaattgactggcggcacgaggaggag

SEQ ID NO: 498 - DNA, 2598 bp, synthetic construct
  misc_feature 1..2598: note = PtIP-83 polypeptide variant encoding polynucleotide
  source 1..2598: mol_type = other DNA
atggctctcgtggattacggcaagcttttcgaggatctgaaccagataagcatgggtgtactggatcgggtagagttttcagaggtgatggtgatccacaggatgtatgtgaggctagctgatctgaatgtggggcagctcgagggagccgagaaagtgaagcggttgtatgtgtttgcggacgtggtggagctaccagtcgtggaatggcggtggccgccgcaaataccaggatcggtgacggtgatcatattgtgtcgtcttcttcaatggccaactgatgggaggcagtcggacaccgagctccacctgacattcatgaagttgcatgccatacaacgagaggaaaatcggtgggagataaccgcagcagatggcatgaactggggagtttacatacacgcagaggaagtacaggttggcgtgctgacaatgtcatggtcttcggtacttagagtttcggcacttcgctctgttataacctccggctttcgcgccgttagtgtgtttgaggtaccgggaagtgtaaggtccacccttggagctactttaaggcccgatcacgccttatatagtacaactatgcaagccacacccaacgcatcgcatattagtgcttttaaccttcgcatagtttccccgtcggcatatcgtgtttgtcctctccaaaatgacacagatacctacttaggtattccagcagacgtggcggcagttcttccagtagacgtggtgactgatcctaacatcttgctgggcatgcagacaacggtacacattgcggagctagtcaaggcatgtcatccgtcacccgatgttgtgagcgctgtaggggagcacctgaactggctcaacaaactcttactcccacttaaggaatcgactcagttgcaaggaagcgagtcgtacaaggagtgccttgcactcttgggtcgtgttcacgctgcgatgaagatggtgagaattggcttagtagtgccccagctgcaatacagaatgtacggtagcctcatcaaccaaatggcccaagtagcacaaaactacgaccgagaattcaagcaattcaaattattcatcatccaaaatcaaatccttggcagctatttgctgcagcagaacagggcatttgctgagagggagctgcagatggagagctttcatgctgctgtcatttctcaaagaagggaggagttggacaatacattcgcaaagatggaccgattgagcgggcaaatggaggcagagagtagtgcaatggagcaagccaaaaaggaaatggacgaaggattgaggcagttccagaataggcaagttgcgaacgccctctttgccgttcttagcgctgtagctcagattgggcttgcattccttacggctggtgcaacggctcctggggctgtggcgtcggcggggcaagctgtgagcatagcaggtcaggcggcgcaaggtctgcgaagggtggtggaaattctagaggggctcgaggctgtgatggaggttgtggctgctgtgaaggacctcgtggattcattggaacaggtaggtcagattgtggacgcaccggtgatgccggaattgccctcagaggcggactggagtatttttgtgaatgagattgaagccgtggcagaggggatgccgacggaagtctcggaggttccggcgtggagggccaagtgcaagaatgtggctgcactgggtagggagatgagcatcacggcagtacagatgtcggagctgcagtatgacatctgggtgcaaggcatgatgcgggatatggctcgaagccaggcagacaggctggccgcaattcaacccgcggaccttaccaactatttggagatggcaatacagatggatatgcggactacgaggatgctgctggggctcctcaacatattgcgcatccagaatgcggcgctcaggtacgagtatcttctaatgcccacggagctcacaacatggccactgggtatggataccgtgggtgacttgctcatcgcgcaggagaatgctgcactgataggattagctcagttagggcccccatcggacttcacgagcaggcatgtagtgaaaggcatacctgtgagcttgcttctagacggtggggattgggaatttgagattcctgtgcaaggtggcatgtccagcttcccttccagctggtctcgcgtccgtattcggcacctggagatgcactttgtgcaggaggcgagcggtggcggcgagattatccaccagcctgccacccagacggggaccatttacatcctcctgcagggctccactgtcttccatgatcgcagaagagaccaggtgttgccttttcaggccgctgctccgctcaactaccattacgcgtaccgcctcgacactggagaagccactcttacgaacgagccctcggaacagtttgccaacaagttcatgcagatgacacccttcactcactggaggctacgtctgtctgcgtccgcagcggagaataaaggattagcctttcccacagctacagctcccgactccaccactgagattgtcatcactttccatgttacggccattagacaaattgactggcggcaagaggaggag

SEQ ID NO: 499 - DNA, 2598 bp, synthetic construct
  misc_feature 1..2598: note = PtIP-83 polypeptide variant encoding polynucleotide
  source 1..2598: mol_type = other DNA
atggctctcgtggattacggcaagcttttcgaggatctgaaccagataagcatgggtgtactggatcgggtagagttttcagaggtgatggtgatccacaggatgtatgtgaggctagctgatctgaatgtggggcagctcgagggagccgagaaagtgaagcggttgtatgtgtttgcggacgtggtggagctaccagtcgtggaatggcggtggccgccgcaaataccaggatcggtgacggtgatcatattgtgtcgtcttcttcaatggccaactgatgggaggcagtcggacaccgagctccacctgacattcatgaagttgcatgccatacaacgagaggaaaatcggtgggagataaccgcagcagatggcatgaactggggagtttacatacacgcagaggaagtacaggttggcgtgctgacaatgtcatggtcttcggtacttagagtttcggcacttcgctctgttataacctccggctttcgcgccgttagtgtgtttgaggtaccgggaagtgtaaggtccacccttggagctactttaaggcccgatcacgccttatatagtacaactatgcaagccacacccaacgcatcgcatattagtgcttttaaccttcgcatagtttccccgtcggcatatcgtgtttgtcctctccaaaatgacacagatacctacttaggtattccagcagacgtggcggcagttcttccagtagacgtggtgactgatcctaacatcttgctgggcatgcagacaacggtacacattgcggagctagtcaaggcatgtcatccgtcacccgatgttgtgagcgctgtaggggagcacctgaactggctcaacaaactcttactcccacttaaggaatcgactcagttgcaaggaagcgagtcgtacaaggagtgccttgcactcttgggtcgtgttcacgctgcgatgaagatggtgagaattggcttagtagtgccccagctgcaatacagaatgtacggtagcctcatcaaccaaatggcccaagtagcacaaaactacgaccgagaattcaagcaattcaaattattcatcatccaaaatcaaatccttggcagctatttgctgcagcagaacagggcatttgctgagagggagctgcagatggagagctttcatgctgctgtcatttctcaaagaagggaggagttggacaatacattcgcaaagatggaccgattgagcgggcaaatggaggcagagagtagtgcaatggagcaagccaaaaaggaaatggacgaaggattgaggcagttccagaataggcaagttgcgaacgccctctttgccgttcttagcgctgtagctcagattgggcttgcattccttacggctggtgcaacggctcctggggctgtggcgtcggcggggcaagctgtgagcatagcaggtcaggcggcgcaaggtctgcgaagggtggtggaaattctagaggggctcgaggctgtgatggaggttgtggctgctataaagcaccttgtggatgctctggaacaggtaggtcagattgtggatgcaccacctatgccagacatgccctcggaggcggactggtccatttttgtgaacgaggtggaggccgtggcagaggggatgccgacggaagtctcggaggttccggcgtggaaggccaagtgcaagaatgtggctgcactgggtcgggagatgagcatcacggcagtacagatgtcggagctgcagtatgacatctgggtgcaaggcttgttgcgggatatagctcgaagccaggcagacaggctggccgcaattcaacccgcggaccttaccaactatttggagatggctacccagatggatatgcggactacgaggatgctgctggggctcctcaacatattgcgcatccagaatgcggcgctcaggtacgagtatcttctaatgcccacggagctcacaacatggccactgggtatggataccgtgggtgacttgctcatcacgcacgagagtgctgcactgtcaggattagctcagttagggcccccatctgatttcacgagcaggcatgtggtgaaaggcatacctgtgagcttgcttctagacggtggggattgggaatttgagattcctgtgcaaggtggcatgtccagcttcccttccagctggactcgcgtccgtattcggcacctggagatgcactttgtgcaggaggcgagcggtggcggcgagattatccaccagcctaccacccagactgggaccgtttacatccttctgcagggttccactgtcttccatgaccgcagaagagaccaggtgttgccttttcaggccgctgctccgctcaactaccattacgcgtaccgcctcgacaccggcgactccactctcacaaacgaaccctctgaacagtttgccaacaagttcatgcagatgacacccttcacccgttggaggcttcgtctgtctgcgtccgcaaaagagaatgcaggattagcctttcccacggctacagctcccgactccactacccagattgtcatcactttccatgttacggccattagacaaattgactggcggcaagaggaggag

SEQ ID NO: 500 - DNA, 2598 bp, synthetic construct
  misc_feature 1..2598: note = PtIP-83 polypeptide variant encoding polynucleotide
  source 1..2598: mol_type = other DNA
atggctctcgtggattacggcaagcttttcgaggatctgaaccagataagcatgggtgtactggatcgggtagagttttcagaggtgatggtgatccacaggatgtatgtgaggctagctgatctgaatgtggggcagctcgagggagccgagaaagtgaagcggttgtatgtgtttgcggacgtggtggagctaccagtcgtggaatggcggtggccgccgcaaataccaggatcggtgacggtgatcatattgtgtcgtcttcttcaatggccaactgatgggaggcagtcggacaccgagctccacctgacattcatgaagttgcatgccatacaacgagaggaaaatcggtgggagataaccgcagcagatggcatgaactggggagtttacatacacgcagaggaagtacaggttggcgtgctgacaatgtcatggtcttcggtacttagagtttcggcacttcgctctgttataacctccggctttcgcgccgttagtgtgtttgaggtaccgggaagtgtaaggtccacccttggagctactttaaggcccgatcacgccttatatagtacaactatgcaagccacacccaacgcatcgcatattagtgcttttaaccttcgcatagtttccccgtcggcatatcgtgtttgtcctctccaaaatgacacagatacctacttaggtattccagcagacgtggcggcagttcttccagtagacgtggtgactgatcctaacatcttgctgggcatgcagacaacggtacacattgcggagctagtcaaggcatgtcatccgtcacccgatgttgtgagcgctgtaggggagcacctgaactggctcaacaaactcttactcccacttaaggaatcgactcagttgcaaggaagcgagtcgtacaaggagtgccttgcactcttgggtcgtgttcacgctgcgatgaagatggtgagaattggcttagtagtgccccagctgcaatacagaatgtacggtagcctcatcaaccaaatggcccaagtagcacaaaactacgaccgagaattcaagcaattcaaattattcatcatccaaaatcaaatccttggcagctatttgctgcagcagaacagggcatttgctgagagggagctgcagatggagagctttcatgctgctgtcatttctcaaagaagggaggagttggacgacgccatcgctaagatggaccgactgagcttgcagatggaggaagaggacagagcaatggagcaagcccgaaaagaaatggaagaaggattgaagcagttccagaatgagcaagttgcaagggctgtgttcgctgttcttaaatctgtagctcagattgggctcgcattcgtcacggctggtgcaacggctcctggagctgtggcgtcggcggggcaagctgtgagcatagcaggtcaggcggcgcaaggtctgcgaagggtggtggaaattctagaggggctcgaggctgtgatggaggttgtggctgctgtgaaggacctcgtggattcattggaacaggtaggtcagattgtggacgcaccggtgatgccggaattgccctcagaggcggactggtccatttttgtgaacgaggtggaggccgtggcagagggcatgccgacggaagtctcggaggttccggcgtggaaggccaagtgcaagaatgtggctgcactgggtcgggagatgagcatcacggcagaacagatgtcggagctgcagtatgacatctgggtgcaaggcatgatgcgggatatggctcgaagccaggcagacaggctggccgcaattcaacccgcggaccttaccaactatttggagatggctacccagatggatatgcggactacgaggatgctgctggggctcctcaacataatgcgcatccagaatgcggcgctcaggtacgagtatcttctaatgcccacggagctcacaacatggccactgggtatggataccgtgggtgacttgctcatcacgcacgagagtgctgcactgtcaggattagctcagttagggcccccatcggacttcacgagcaggcatgtagtgaaaggcatacctgtgagcttgcttctagacggtggggattgggaatttgagattcctgtgcaaggtggcatgtccagcttcccttccagctggtctcgcgtccgtattcggcacctggagatgcactttgtgaaggaggccagcggtggcggcgagattatccaccagcctgccacccagacggggaccatttacatcctcctgcagggttccactatcttccatgaccgcagaagggaggaggtgatgacctttcaggcagcggttccgctcaactaccattacgcgtaccgcctcgacaccggcgactccactctcacaaacgaaccctctgaacagtttgccaacacattcatgcagatgacacccttcacccgttggaggcttcgtctgtctgcgtccgcagcggagaataaaggattagcctttcccacagctacagctcccgactccaccactgagattgtcatcactttccatgttacggccatcagacaaattgactggcggcaagaggaggag

SEQ ID NO: 501 - DNA, 2602 bp, synthetic construct
  misc_feature 1..2602: note = PtIP-83 polypeptide variant encoding polynucleotide
  source 1..2602: mol_type = other DNA
atggctctcgtggattacggcaagcttttcgaggatctgaaccagataagcatgggtgtactggatcgggtagagttttcagaggtgatggtgatccacaggatgtatgtgaggctagctgatctgaatgtggggcagctcgagggagccgagaaagtgaagcggttgtatgtgtttgcggacgtggtggagctaccagtcgtggaatggcggtggccgccgcaaataccaggatcggtgacggtgatcatattgtgtcgtcttcttcaatggccaactgatgggaggcagtcggacaccgagctccacctgacattcatgaagttgcatgccatacaacgagaggaaaatcggtgggagataaccgcagcagatggcatgaactggggagtttacatacacgcagaggaagtacaggttggcgtgctgacaatgtcatggtcttcggtacttagagtttcggcacttcgctctgttataacctccggctttcgcgccgttagtgtgtttgaggtaccgggaagtgtaaggtccacccttggagctactttaaggcccgatcacgccttatatagtacaactatgcaagccacacccaacgcatcgcatattagtgcttttaaccttcgcatagtttccccgtcggcatatcgtgtttgtcctctccaaaatgacacagatacctacttaggtattccagcagacgtggcggcagttcttccagtagacgtggtgactgatcctaacatcttgctgggcatgcagacaacggtacacattgcggagctagtcaaggcatgtcatccgtcacccgatgttgtgagcgctgtaggggagcacctgaactggctcaacaaactcttactcccacttaaggaatcgactcagttgcaaggaagcgagtcgtacaaggagtgccttgcactcttgggtcgtgttcacgctgcgatgaagatggtgagaattggcttagtagtgccccagctgcaatacagaatgtacggtagcctcatcagacaaatggcccaagtagcacaaaactacgaccgagaattcaagcaattcaaattattcatcatccaaaatcaaatccttggcagctatttgctgcagcagaacagggcatttgctgagagggagctgcagatggagagctttcatgctgctgtcatttctcaaagaaggcaggagttggacgacgccatcgctaagatggaccgactgagcttgcagatggaggaagaggacagagcaatggagcaagcccgaaaggaaatggacgaaggattgaggcagttccagaataggcaagttgcgaacgccctctttgccgttcttagcgctgtagctcagattgggcttgcattccttacggctggtgcaacggctcctggagctgtggcgtcggcggggcaagctgtgagcatagcaggtcaggcggcgcaaggtctgcgaagggtggtggaaattctagagcagctggaggctgtgatggaggttgtggctgctgtgaaggacctcgtggattcattggaacaggtaggtcagattgtggacgcaccggtgatgccggaattgccctcagaggcggactggtccatttttgtgaatgagattgaagccgtggcagaggggatgccaacggaagtctcggaggttccggtgtggagggccaagtgcaagaatgtggctgcactgggtcgggagatgtgcatcacggcagtacagatgtcggagctgcagtatgacatctgggtgcaaggcttgttgcgggatatggctcgaagccaggcagacaggctggccgcaattcaacccgcggaccttaccaactatttggagatggctacccagatggatatgcggactacgaggatgctgctggggctcctcaacatattgcgcatccagaatgcggcgctcaggtacgagtatcttctaatgcccacgcagctcactgcatggccgctgagaatggatactgtggccaacttgctcatcacgcacgagagtgctgcactgtcaggattagctcagttagggcccccatcggacttcacgagcaggcatgtagtgaaaggcatacctgtgagcttgcttctagacggtggggattgggaatttgagattcctgtgcaaggtggcatgtccagtttcccttccagctggactcgagtgcggattcggcacctggagatgcactttgtgcaggaggcgagcggtggcggcgagattatccaccagcctaccacccagactgggaccgtttacatccttctgcagggttccactatcttccatgaccgcagaagagaccaggtgttgccttttcaggccgctgctccgctcaactaccattacgcgtaccgcctcgacaccggcgactccactctcacaaacgaaccctctgaacagtttgccaacaagttcatgcagatgacacccttcacccgttggaggcttcgtctgtctgcgtccgcaaaagagaatgcaggattagcctttcccacggctacagcacttgactccactacccagattgtcatcactttccatgttacggccatcagacaaattgactggcggcacgacgaagagtagc

SEQ ID NO: 502 - DNA, 2601 bp, synthetic construct
  misc_feature 1..2601: note = PtIP-83 polypeptide variant encoding polynucleotide
  source 1..2601: mol_type = other DNA
atggctctcgtggattacggcaagcttttcgaggatctgaaccagataagcatgggtgtactggatcgggtagagttttcagaggtgatggtgatccacaggatgtatgtgaggctagctgatctgaatgtggggcagctcgagggagccgagaaagtgaagcggttgtatgtgtttgcggacgtggtggagctaccagtcgtggaatggcggtggccgccgcaaataccaggatcggtgacggtgatcatattgtgtcgtcttcttcaatggccaactgatgggaggcagtcggacaccgagctccacctgacattcatgaagttgcatgccatacaacgagaggaaaatcggtgggagataaccgcagcagatggcatgaactggggagtttacatacacgcagaggaagtacaggttggcgtgctgacaatgtcatggtcttcggtacttagagtttcggcacttcgctctgttataacctccgactttcgcgccgttagtgtgtttgaggtaccgggaagtgtaaggtccacccttggagctactttaaggcccgatcacgccttatatagtacaactatgcaagccacacccaacgcatcgcatattagtgcttttaaccttcgcatagtttccccgtcggcatatcgtgtttgtcctctccaaaatgacacagatacctacttaggtattccagcagacgtggcggcagttcttccagtagacgtggtgactgatcctaacatcttgctgggcatgcagacaacggtacacattgcggagctagtcaaggcatgtcatccgtcacccgatgttgtgagcgctgtaggggagcacctgaactggctcaacaaactcttactcccacttaaggaatcgactcagttgcaaggaagcgagtcgtacaaggagtgccttgcactcttgggtcgtgttcacgctgcgatgaagatggtgagaattggcttagtagtgccccagctgcaatacagaatgtacggtagcctcatcaaccaaatggcccaagtagcacaaaactacgaccgagaattcaagcaattcaaattattcatcatccaaaatcaaatccttggcagctatttgctgcagcagaacagggcatttgctgagagggaggtgcagatggagagctttcattcagcggtcatttctcaaagaaggcaggagttggacaatacattcgcaaagatggaccgactgagcttgcagatggaggaagaggacagagcaatggagcaagcccgaaaagaaatggaagaaggattgaagcagttccagaatgagcaagttgcaagggctgtgttcgctgttcttaaatctgtagctatgattgcgctcgcattcgtcacggctggtgcaacggctcctggagctgtggcgtcggcggggcaagctgtgagcatagcaggtcaggcggcacaagctctgcgaagggtggtggaaattctagaggggctcgaggctgtgatggaggttgtggctgctgtgaaggacctcgtggattcattggaacaggtaggtcagattgtggacgcaccggtgatgccggaattgccctcggaggcggactggtccatttttgtgaacgaggtggaggccgtggcagaggggatgccgacggaagtctcggaggtcccggcgtggaaggccaagtgcaagaatgtggctgcactgggtagggagatgtgcatcacggcagtacagatgtcggagctgcagtatgacatctgggtgcaaggcatgatgcgggatatggctcgaagccaggcagacaggctggccgcaattcaacccgcggaccttaccaactatttggagatggctacccagatggatatgcggactacgaggatactgatagggctcctcaacatattgcgcatccagaatgcggcacttatgtatgagtaccttctaacgcccacgcagctcactgcatggccgctgagaatggatactgtggccaacttgctcatcacgcacgagagtgctgcactgtcaggattagctcagttagggcccccatcggacttcacgagcaggcatgtggtgaaagacatacctgtgaacttgctgctcgatggcgaggattgggagtttgagattcctgtgcaagctggcatgtccagcttcccttccagctggactcgagtgcggattcggcacctggagatgcactttgtgaaggaggccagcggtattggtggtgagattatccaccagcctgccacccagactgggaccgtttacatccttctgcagggttccactatcttccatgatcgcagaagggaggaggtgatgacctttcaggcagcggttccgctcaactaccattacgcgtaccgcctcgacactggagaagccactcttacgaacgagccctcggaacagtttgccaacacattcatgcagatgacaccgttcactcactggaggctacgtctgtctgcgtccgcagcggagaataaaggattagcctttcccacggctacagcacttgactccactacccagattgtcatcactttccatgttacggccattagacaaattgactggcggcacgacgaagag

SEQ ID NO: 503 - DNA, 2598 bp, synthetic construct
  misc_feature 1..2598: note = PtIP-83 polypeptide variant encoding polynucleotide
  source 1..2598: mol_type = other DNA
atggctctcgtggattacggcaagcttttcgaggatctgaaccagataagcatgggtgtactggatcgggtagagttttcagaggtgatggtgatccacaggatgtatgtgaggctagctgatctgaatgtggggcagctcgagggagccgagaaagtgaagcggttgtatgtgtttgcggacgtggtggagctaccagtcgtggaatggcggtggccgccgcaaataccaggatcggtgacggtgatcatattgtgtcgtcttcttcaatggccaactgatgggaggcagtcggacaccgagctccacctgacattcatgaagttgcatgccatacaacgagaggaaaatcggtgggagataaccgcagcagatggcatgaactggggagtttacatacacgcagaggaagtacaggttggcgtgctgacaatgtcatggtcttcggtacttagagtttcggcacttcgctctgttataacctccggctttcgcgccgttagtgtgtttgaggtaccgggaagtgtaaggtccacccttggagctactttaaggcccgatcacgccttatatagtacaactatgcaagccacacccaacgcatcgcatattagtgcttttaaccttcgcatagtttccccgtcggcatatcgtgtttgtcctctccaaaatgacacagatacctacttaggtattccagcagacgtggcggcagttcttccagtagacgtggtgactgatcctaacatcttgctgggcatgcagacaacggtacacattgcggagctagtcaaggcatgtcatccgtcacccgatgttgtgagcgctgtaggggagcacctgaactggctcaacaaactcttactcccacttaaggaatcgactcagttgcaaggaagcgagtcgtacaaggagtgccttgcactcttgggtcgtgttcacgctgcgatgaagatggtgagaattggcttagtagtgccccagctgcaatacagaatgtacggtagcctcatcaaccaaatggcccaagtagcacaaaactacgaccgagaattcaagcaattcaaattattcatcatccaaaatcaaatccttggcagctatttgctgcagcagaacagggcatttgctgagagggagctgcagatggagagctttcatgctgctgtcatttctcaaagaagggaggagttggacaatacattcgcaaagatggaccgattgagcgggcagatggaggaagaggacagagcaatggagcaagcccgaaaagaaatggaagaaggattgaagcagttccagaatgagcaagttgcaagggctgtgttcgctgttcttaaatctgtagctcagattgggcttgcattccttacggctggtgcaacggctcctggagctgtggcgtcggcggggcaagctgtgagcatagcaggtcaggcggcgcaaggtctgcgaagggtggtggaaattctagagcagctggaggctgtgatggaggttgtggctgctgtgaaggacctcgtggattcattggaacaggtaggtcagattgtggacgcaccggtgatgccggaattgccctcagaggcggactggtccatttttgtgaacgaggtggaggccgtggcagagggcatgccaacggaagtctcggaggttccggtgtggaaggccaagtgcaagaatgtggctgcactgggtcgggagatgagcatcacggcagtacagatgtcggagctgcagtatgacatctgggtgcaaggcatgatgcgggatatggctcgaagccaggcagacaggctggccgcaattcaacccgcggaccttaccaactatttggagatggcaatacagatggatatgcggactacgaggatgctgctggggctcctcaacatattgcgcatccagaatgcggcgctcaggtacgagtatcttctaatgcccacggagctcacaacatggccactgggtatggataccgtggccaacttgctcatcacgcacgagagtgctgcactgtcaggattagctcagttagggccctcatctgatttctcgagcaggcatgtagtgaaaggcatacctgtgagcttgcttctagacggtggggattgggagtttgagattcctgtgcaagctggcatgtccagcttcccttccagctggtctcgcgtccgtattcggcacctggagatgcactttgtgaaggaggcgagcggtggcggcgagattatccaccagcctaccacccagacggggaccatttacatcctcctgcagggctccactgtcttccatgatcgcagaagggaggaggtgatgacctttcaggcagcggttccgctcaactaccattacgcgtaccgcctcgacactggagaagccactcttacgaacgagccctcggaacagtttgccaacaagttcatgcagatgacacccttcacccgttggaggcttcgtctgtctgcgtccgcaaaagagaatgcaggattagcctttcccacggctacagcacttgactccactacccagattgtcatcactttccatgttacggccattagacaaattgactggcggcaagaggaggag

SEQ ID NO: 504 - DNA, 2602 bp, synthetic construct
  misc_feature 1..2602: note = PtIP-83 polypeptide variant encoding polynucleotide
  source 1..2602: mol_type = other DNA
atggctctcgtggattacggcaagcttttcgaggatctgaaccagataagcatgggtgtactggatcgggtagagttttcagaggtgatggtgatccacaggatgtatgtgaggctagctgatctgaatgtggggcagctcgagggagccgagaaagtgaagcggttgtatgtgtttgcggacgtggtggagctaccagtcgtggaatggcggtggccgccgcaaataccaggatcggtgacggtgatcatattgtgtcgtcttcttcaatggccaactgatgggaggcagtcggacaccgagctccacctgacattcatgaagttgcatgccatacaacgagaggaaaatcggtgggagataaccgcagcagatggcatgaactggggagtttacatacacgcagaggaagtacaggttggcgtgctgacaatgtcatggtcttcggtacttagagtttcggcacttcgctctgttataacctccggctttcgcgccgttagtgtgtttgaggtaccgggaagtgtaaggtccacccttggagctactttaaggcccgatcacgccttatatagtacaactatgcaagccacacccaacgcatcgcatattagtgcttttaaccttcgcatagtttccccgtcggcatatcgtgtttgtcctctccaaaatgacacagatacctacttaggtattccagcagacgtggcggcagttcttccagtagacgtggtgactgatcctaacatcttgctgggcatgcagacaacggtacacattgcggagctagtcaaggcatgtcatccgtcacccgatgttgtgagcgctgtaggggagcacctgaactggctcaacaaactcttactcccacttaaggaatcgactcagttgcaaggaagcgagtcgtacaaggagtgccttgcactcttgggtcgtgttcacgctgcgatgaagatggtgagaattggcttagtagtgccccagctgcaatacagaatgtacggtagcctcatcaaccaaatggcccaagtagcacaaaactacgaccgagaattcaagcaattcaaattattcatcatccaaaatcaaatccttggcagctatttgctgcagcagaacaaggcctttgctgacagagaggtgcagatggagagctttcatgctgctgtcatttctcaaagaagggaggagttggacaatacattcgcaaagatggaccgattgagcgggcaaatggaggcagagagtagtgcaatggagcaagccaaaaaggaaatggacgaaggattgaggcagttccagaatgagcaagttgcaagggctgtgttcgctgttcttaaatctgtagctatgattgcgctcgcattcgtcacggctggtgcaacggctcctggagctgtggcgtcggcggggcaagctgtgagcatagcaggtcaggcggcacaaggtctgcgaagggtggtggaaattctagaggggctcgaggctgtgatggaggttgtggctgctgtgaaggacctcgtggattcattggaacaggtaggtcagattgtggatgcaccggtgatgccggaattgccctcagaggcggactggtccatttttgtgaacgaggtggaggccgtggcagagggcatgccgacggaagtctcggaggttccggcgtggagggccaagtgcaagaatgtggctgcactgggtagggagatgtgcatcacggcagtacagatttcccagctccagtatgacatctgggtgcaaggcatgatgcgggatatggctcgaagccaggcagacaggctggccgcaattcaacccgcggaccttaccaactatttggagatggctacccagatggatatgcggactacgaggatgctgctggggctcctcaacatattgcgcatccagaatgcggcgctcaggtacgagtatcttctaatgcccacggagctcacaacatggccactgggtatggataccgtgggtgacttgctcatcgcgcaggagaatgctgcactgataggattaatgcagctagggcccccatcggacttcacgagcaggcatgtggtgaaagacatacctgtgaacttgctgctcgatggcgaggattgggagtttgagattcctgtgcaagctggcatgtccagcttcccttccagctggtctcgcgtccgtattcggcacctggagatgcactttgtgcaggaggcgagcggtggcggcgagattatccaccagcctaccacccagactgggaccgtttacatccttctgcagggttccactatcttccatgaccgcagaagagaccaggtgttgccttttcaggccgctgctccgctcaactaccattacgcgtaccgcctcgacactggagaagccactcttacgaacgagccctcggaacagtttgccaacacattcatgcagatgacaccgttcactcactggaggctacgtctgtctgcgtccgcagcggagaataaaggattagcctttcccacagctacagctcccgactccaccactgagattgccatcactttccatgttacggccatcagacaaattgactggcggcacgacgaagagtagc

SEQ ID NO: 505 - DNA, 2050 bp, synthetic construct
  misc_feature 1..2050: note = PtIP-83 polypeptide variant encoding polynucleotide
  source 1..2050: mol_type = other DNA
atggattacagcacgctttacagggatctgaaccagataagcatgcccctggatcgggtagagttctcagaggtgatggtgatccacaggatgtatgtgaggctagctgatctgaatgtgggggagctccccggagccgagagggtgaagcggttgtatgtgttggcagacgtggtgactgatcctaacatcttgatgggcatgcaaaccagcgtgcacattgcggagctagtgaaggcatgttacccgtcaccagaattagtgagcgctgtaggggtgcacgtgaattggctcaacgaagtcttgctccgagttgtccagaaggaatctcagttgcaagggaccgaggcctacaacgagtgccttgcgcttttaggtcgcattcaatgtgtcatgaagatggggccgtttgtctcggtagtgccgcagctgcaatacagaatgtatggtagcctcatcagacaaatggcccaggtagcacagaactacgaccaagatttcaggcagctcaagttattcattgcccaaaaccaaatccttggcagctatttgctgcagcagaacaaggcctttgctgacagagaggtgcagatggagagctttcattcagcggtcatttctcaaagaaggcaggagttggacgacgccatcgctaagatggaccgactgagcttgcagatggaggaagaggacagagcaatggagcaagcccgaaaagaaatggaagaaggattgaagcagttccagaatgagcaagttgcaagggctgtgttcgctgttcttaaatctgtagctatgattgcgctcgcattcgtcacggctggtgcaacggctcctggggctgcagcatctgcagcgcaagctgtgagcatagcaggtcaggcggcgcaaggtctgcgaagggtggtggaaattctagagcagctggaggctgtgatggaggttgtggctgctgtgaaggacctcgtggattcattggaacaggtaggtcagattgtggacgcaccggtgatgccggaattgccctcagaggcggactggagtatttttgtgaacgaggtggaggccgtggcagagggcatgccaacggaagtctcggaggttccggtgtggagggccaagtgcaagaatgtggctgcactgggtagggagatgtgcatcacggcagtacagatgtcggagctgcagtatgacatctgggtgcaaggcatgatgcgggatatagctcaaagccacgcagaccggctggcagcgattcaacctgctaatcttaccaactatttggagatggctacccagatggatatgcggactacgaggatgctgctggggctcctcaacatattgcgcatccagaatgcggcgctcaggtacgagtatcttctaatgcccacggagctcacaacatggccactgggtatggataccgtgggtgacttgctcatcgcgcaggagaatgctgcactgataggattaatgcagctagggccctcatctgatttcacgagcaggcatgtagtgaaaggcatacctgtgagcttgcttctagacggtggggattgggaatttgagattcctgtgcaaggtggcatgtccagtttcccttccagctggtctcgcgtccgtattcggcacctggagatgcactttgtgaaggaggccagcggtattggtggtgagattatccaccagcctaccacccagactgggaccgtttacatccttctgcagggctccactgtcttccatgatcgcagaagggaggaggtgatgacctttcaggcagcggttccgctcaactaccattacgcgtaccgcctcgacaccggcgactccactctcacgaacgagccctcggaacagtttgccaacacattcatgcagatgacacccttcacccgttggaggcttcgtctgtctgcgtccgcagcggagaataaaggattagcctttcccacagctacagctcccgactccaccactgagattgccatcactttccatgttacggccattagacaaattgactggcggcacgacgaagagtagc

SEQ ID NO: 506 - DNA, 2569 bp, synthetic construct
  misc_feature 1..2569: note = PtIP-83 polypeptide variant encoding polynucleotide
  source 1..2569: mol_type = other DNA
atggctctcgtggattacggcaagcttttcgaggatctgaaccagataagcatgggtgtactggatcgggtagagttttcagaggtgatggtgatccacaggatgtatgtgaggctagctgatctgaatgtggggcagctcgagggagccgagaaagtgaagcggttgtatgtgtttgcggacgtggtggagctaccagtcgtggaatggcggtggccgccgcaaataccaggatcggtgacggtgatcattctgtgtcgtcttcttcagtttccaactgatgggtcgttcgctgcttggctcgagctgccgttcatggagttgcacacactcatagaacaatacaggtcagagataaaagcagcagatgacgcgaaatggggaacgtatgtacacgcggaggaagtacagctcagcccgctgtttaatgggtggccttatctggttgttgaggcacagcgctgtattataaccgcggccatgcacaatacatttaaccgccctgggtgggttcgctccattactcaatttacaactgatcagtccggtcgggtagataccacactgctcgcacgaacagaattcggccatattgatctaccactcgaaacagattccccaacggcattcagtgtttcacaccgccaaagtacgaatttgcccgtagagtacaccggtattccagtggaggtggtgaccgatcctaacatcttgatgggcatgcagacaacggtacacattgcggagctagtcaaggcatgtcatccgtcacccgatgttgtgagcgctgtaggggagcacctgaactggctcaacgaagtcttgctccgagttgtccagaaggaatctcagttgcaagggaccgaggcctacaacgagtgccttgcgcttttaggtcgcattcaatgtgtcatgaagatggggccgtttgtctcggtagtgccgcagctgcaatacagaatgtatggtagcctcatcaaccaaatggcccaggtagcacagaactacgaccaagatttcaggcagctcaagttattcattgcccaaaaccaaatccttggcagctatttgctgcagcagaacagggcatttgctgacagagaggtgcagatggagagctttcattcagcggtcatttctcaaagaaggcaggagttggacgacgccatcgctaagatggaccgactgagcttgcagatggaggaagaggacagagcaatggagcaagccaaaaaggaaatggacgaaggattgaggcagttccagaataggcaagttgcgaacgccctctttgccgttcttagcgctgtagctcagattgggcttgcattccttacggctggtgcaacggctcctggagctgtggcgtcggcggggcaagctgtgagcatagcaggtcaggcggcgcaaggtctgcgaagggtggtggaaattctagaggggctcgaggctgtgatggaggttgtggctgctgtgaaggacctcgtggattcattggaacaggtaggtcagattgtggacgcaccggtgatgccggaattgccctcagaggcggactggtccatttttgtgaacgaggtggaggccgtggcagagggcatgccaacggaagtctcggaggttccggtgtggaaggccaagtgcaagaatgtggctgcactgggtcgggagatgagcatcacggcagaacagatgtcggagctgcagtatgacatctgggtgcaaggcttgatgcgggatatggctcgaagccaggcagacaggctggccgcaattcaacccgcggaccttaccaactatttggagatggctacccagatggatatgcggactacgaggatgctgctggggctcctcaacataatgcgcatccagaatgcggcgctcaggtacgagtatcttctaatgcccacggagctcacaacatggccactgggtatggataccgtgggtgacttgctcatcgcgcaggagaatgctgcactgataggattaatgcagctagggcccccatcggacttcacgagcaggcatgtagtgaaaggcatacctgtgagcttgcttctagacggtggggattgggaatttgagattcctgtgcaagctggcatgtccagtttcccttccagctggactcgagtgcggattcggcacctggagatgcactttgtgaaggaggccagcggtattggtggtgagattatccaccagcctaccacccagactgggaccgtttacatccttctgcagggttccactatcttccatgaccgcagaagagaccaggtgttgccttttcaggccgctgctccgctcaactaccattacgcgtaccgcctcgacactggagaagccactcttacgaacgagccctcggaacagtttgccaacacattcatgcagatgacacccttcacccgttggaggcttcgtctgtctgcgtccgcaaaagagaatgcaggattagcctttcccacggctacagcacttgactccactacccagattgtcatcactttccatgttacggccatcagacaaattgactggcggcacgacgaagagtagc

SEQ ID NO: 507 - DNA, 2563 bp, synthetic construct
  misc_feature 1..2563: note = PtIP-83 polypeptide variant encoding polynucleotide
  source 1..2563: mol_type = other DNA
atggattacagcacgctttacagggatctgaaccagataagcatgcccctggatcgggtagagttctcagaggtgatggtgatccacaggatgtatgtgaggctagctgatctgaatgtggggcagctcgagggagccgagaaagtgaagcggttgtatgtgttggcagacgtggtggagctcgcaacatttgcgcatccacagttgcttaatacgcggatgccaggatcggtgacggtgatcattctgtgtcgtcttcttcagtttccaactgatgggtcgttcgctgcttggctcgagctgccgttcatggagttgcacacactcataggacaatacaggtcagagataaaagcagcagatgacgcgaaatggggaacgtatgtacacgcggaggaagtacagctcagcccgctgtttaatgggtggccttatctggttgttgaggcacagcgctgtattataaccgcggccatgcacaatacatttaaccgccctgggtgggttcgctccattactcaatttacaactgatcagtccggtcgggtagataccacactgctcgcacgaacagaattcggccatattgatctaccactcgaaacagattccccaacggcattcagtgtttcacaccgccaaagtacgaatttgcccgtagagtacaccggtattccagtggaggtggtgaccgatcctaacatcttgatgggcatgcaaaccagcgtgcacattgcggagctagtgaaggcatgttacccgtcacccgatgttgtgagcgctgtaggggtgcacgtgaattggctcaacgaagtcttgctccgagttgtccagaaggaatctcagttgcaagggaccgaggcctacaacgagtgccttgcgcttttaggtcgcattcaatgtgtcatgaagatggggccgtttgtctcggtagtgccgcagctgcaatacagaatgtatggtagcctcatcagacaaatggcccaggtagcacagaactacgaccaagatttcaggcagctcaagttattcattgcccaaaaccaaatccttggcagctatttgctgcagcagaacaaggcctttgctgacagagaggtgcagatggagagctttcatgctgctgtcatttctcaaagaaggcaggagttggacgacgccatcgctaagatggaccgactgagcttgcagatggaggaagaggacagagcaatggagcaagccaaaaaggaaatggacgaaggattgaggcagttccagaataggcaagttgcgaacgccctctttgccgttcttagcgctgtagctcagattgggctcgcattccttacggctggtgcaacggctcctggagctgtggcgtcggcggggcaagctgtgagcatagcaggtcaggcggcgcaaggtctgcgaagggtggtggaaattctagaggggctcgaggctgtgatggaggttgtggctgctgtgaaggacctcgtggattcattggaacaggtaggtcagattgtggacgcaccggtgatgccggaattgccctcagaggcggactggtccatttttgtgaacgaggtggaggccgtggcagagggcatgccaacggaagtctcggaggttccggtgtggagggccaagtgcaagaatgtggctgcactgggtagggagatgtgcatcacggcagaacagatttcccagctccagtatgacatctgggtgcaaggcttgttgcgggatatagctcaaagccacgcagaccggctggcagcgattcaacctgctaatcttaccaactatttggagatggcaatacagatggatatgcggactacgaggatactgatagggctcctcaacataatgcgcatccagaatgcggcacttatgtatgagtaccttctaacgcccacgcagctcactgcatggccgctgagaatggatactgtggccaacttgctcatcacgcacgagagtgctgcactgtcaggattagctcagttagggcccccatcggacttcacgagcaggcatgtagtgaaaggcatacctgtgagcttgcttctagacggtggggattgggaatttgagattcctgtgcaaggtggcatgtccagtttcccttccagctggactcgagtgcggattcggcacctggagatgcactttgtgcaggaggccagcggtattggtggtgagattatccaccagcctaccacccagacggggaccatttacatcctcctgcagggctccactgtcttccatgatcgcagaagggaggaggtgatgacctttcaggcagcggttccgctcaactaccattacgcgtaccgcctcgacaccggcgactccactctcacaaacgagccctcggaacagtttgccaacacattcatgcaggtgacacccttcacccgttggaggcttcgtctgtctgcgtccgcaaaagagaatgcaggattagcctttcccacggctacagcacttgactccactacccagattgtcatcacttttcatgttacggccatcagacaaattgactggcggcacgacgaagagtagc

SEQ ID NO: 508 - DNA, 2569 bp, synthetic construct
  misc_feature 1..2569: note = PtIP-83 polypeptide variant encoding polynucleotide
  source 1..2569: mol_type = other DNA
atggctctcgtggattacggcaagcttttcgaggatctgaaccagataagcatgcccctggatcgggtagagttctcagaggtgatggtgatccacaggatgtatgtgaggctagctgatctgaatgtggggcagctcgagggagccgagagggtgaagcggttgtatgtgttggcagacgtggtggagctcgcaacatttgcgcatccacagttgcttaatacgcggatgccaggatcggtgacggtgatcattctgtgtcgtcttcttcagtttccaactgatgggtcgttcgctgcttggctcgagctgccgttcatggagttgcacacactcatagaacaatacaggtcagagataaaagcagcagatgacgcgaaatggggaacgtatgtacacgcggaggaagtacagctcagcccgctgtttaatgggtggccttatctggttgttgaggcacagcgctgtattataaccgcggccatgcacaatacatttaaccgccctgggtgggttcgctccattactcaatttacaactgatcagtccggtcgggtagataccacactgctcgcacgaacagaattcggccatattgatctaccactcgaaacagattccccaacggcattcagtgtttcacaccgccaaagtacgaatttgcccgtagagtacaccggtattccagtggaggtggtgaccgatcctaacatcttgatgggcatgcaaaccagcgtgcacattgcggagctagtcaaggcatgttacccgtcaccagaattagtgagcgctgtaggggtgcacgtgaattggctcaacgaagtcttgctccgagttgtccagaaggaatctcagttgcaagggaccgaggcctacaacgagtgccttgcgcttttaggtcgcattcaatgtgtcatgaagatggggccgtttgtctcggtagtgccgcagctgcaatacagaatgtacggtagcctcatcaaccaaatggcccaggtagcacagaactacgaccaagatttcaggcagctcaagttattcattgcccaaaaccaaatccttggcagctatttgctgcagcagaacagggcatttgctgagagggagctgcagatggagagctttcatgctgctgtcatttctcaaagaagggaggagttggacaatacattcgcaaagatggaccgactgagcttgcagatggaggaagaggacagagcaatggagcaagccaaaagggaaatggacgaaggattgaggcagttccagaatgagcaagttgcaagggctgtgttcgctgttcttaaatctgtagctatgattgcgctcgcattcgtcacggctggtgcaacggctcctggagctgtggcgtcggcggggcaagctgtgagcatagcaggtcaggcggcgcaaggtctgcgaagggtggtggaaattctagaggggctcgaggctgtgatggaggttgtggctgctataaagcaccttgtggatgctctggaccaggtaagtcagattgtggacgcaccggtgatgccggaattgccctcagaggcggactggtccatttttgtgaacgaggtggaggccgtggcagagggcatgccaacggaagtctcggaggttccggtgtggagggccaagtgcaagaatgtggctgcactgggtagggagatgtgcatcacggcagaacagatttcccagctccagtatgacatctgggtgcaaggcttgttgcgggatatagctcaaagccacgcagaccggctggccgcaattcaacccgcggaccttaccaactatttggagatggctacccagatggatatgcggactacgaggatgctgctggggctcctcaacatattgcgcatccagaatgcggcgctcaggtacgagtatcttctaatgcccacggagctcacaacatggccactgggtatggataccgtgggtgacttgctcatcacgcacgagagtgctgcactgtcaggattagctcagttagggcccccatcggacttcacgagcaggcatgtggtgaaagacatacctgtgaacttgctgctcgatggcgaggattgggagtttgagattcctgtgcaagctggcatgtccagtttcccttccagctggactcgagtgcggattcggcacctggagatgcactttgtgcaggaggcgagcggtggcggcgagattatccaccagcctaccacccagactgggaccgtttacatccttctgcagggttccactgtcttccatgatcgcagaagggaggaggtgatgacctttcaggcagcggttccgctcaactaccattacgcgtaccgcctcgacaccggcgactccactctcacgaacgagccctcggaacagtttgccaacaagttcatgcagatgacaccgttcactcactggaggctacgtctgtctgcgtccgcagcggagaataaaggattagcctttcccacagctacagctcccgactccaccactgagattgccatcactttccatgttacggccattagacaaattgactggcggcacgacgaagagtagc

SEQ ID NO: 509 - DNA, 2565 bp, synthetic construct
  misc_feature 1..2565: note = PtIP-83 polypeptide variant encoding polynucleotide
  source 1..2565: mol_type = other DNA
atggctctcgtggattacggcaagcttttcgaggatctgaaccagataagcatgcccctggatcgggtagagttctcagaggagatggtgatccacaggatgtatgtgaggctagctgatctgaatgtggggcagctcgagggagccgagaaagtgaagcggttgtatgtgttggcagacgtggtggagctcgccacatttgcgcatccacagttgcttaatacgcggatgccaggatcggtgacggtgatcattctgtgtcgtcttcttcagtttccaactgatgggtcgttcgctgcttggctcgagctgccgttcatggagttgcacacactcatagaacaatacaggtcagagataaaagcagcagatgacgcgaaatggggaacgtatgtacacgcggaggaagtacagctcagcccgctgtttaatgggtggccttatctggttgttgaggcacagcgctgtattataaccgcggccatgcacaatacatttaaccgccctgggtgggttcgctccattactcaatttacaactgatcagtccggtcgggtagataccacactgctcgcacgaacagaattcggccatattgatctaccactcgaaacagattccccaacggcattcagtgtttcacaccgccaaagtacgaatttgcccgtagagtacaccggtattccagtggaggtggtgaccgatcctaacatcttgatgggcatgcaaaccagcgtgcacattgcggagctagtgaaggcatgttacccgtcaccagaattagtgagcgctgtaggggtgcacgtgaattggctcaacgaagtcttgctccgagttgtccagaaggaatctcagttgcaagggaccgaggcctacaacgagtgccttgcgcttttaggtcgcattcaatgtgtcatgaagatggggccgtttgtctcggtagtgccccagctgcaatacagaatgtacggtagcctcatcagacaaatggcccaggtagcacagaactacgaccgagaattcaagcaattcaaattattcatcatccaaaatcaaatccttggcagctatttgctgcagcagaacagggcatttgctgagagggagctgcagatggagagctttcattcagcggtcatttctcaaagaaggcaggagttggacgacgccatcgctaagatggaccgactgagcttgcagatggaggcagagagtagtgcaatggagcaagccaaaaaggaaatggacgaaggattgaggcagttccagaataggcaagttgcgaacgccctctttgccgttcttagcgctgtagctcagattgggcttgcattccttacggctggtgcaacggctcctggagctgtggcgtcggcggggcaagctgtgagcatagcaggtcaggcggcgcaaggtctgcgaagggtggtggaaattctagagcagctggaggctgtgatggaggttgtggctgctgtgaaggacctcgtggattcattggaacaggtaggtcagattgtggacgcaccggtgatgccggaattgccctcggaggcggactggagtatttttgtgaatgagattgaagccgtggcagaggggatgccgacggaagtctcggaggttccggcgtggaaggccaagtgcaagaatgtggctgcactgggtagggagatgtgcatcacggcagaacagatttcccagctccagtatgacatctgggtgcaaggcttgttgcgggatatagctcaaagccacgcagaccggctggcagcgattcaaccagctaatcttaccaactatttggagatggctatacagatggatatgcggactacgaggatgctgccggggctcctcaacatattgcgcatccagaatgcggcgctcaggtacgagtatcttctaatgcccacggagctcacaacatggccactgggtatggataccgtgggtgacttgctcatcgcgcaggagaatgctgcactgataggattaatgcagctagggccctcatctgatttcacgagcaggcatgtggtgaaaggcatacctgtgagcttgcttctagacggtggggattgggaatttgagattcctgtgcaagctggcatgtccagcttcccttccagctggtctcgcgtccgtattcggcacctggagatgcactttgtgcaggaggcgagcggtggcggcgagattatccaccagcctgccacccagacggggaccatttacatcctcctgcagggctccactgtcttccatgatcgcagaagagaccaggtgttgccttttcaggccgctgctccgcccaactaccattacgcgtaccgcctcgacaccggcgactccactctcacaaacgaaccctctgaacagtttgccaacacattcatgcagatgacaccgttcactcactggaggctacgtctgtctgcgtccgcagcggagaataaaggattagcctttcccacagctacagctcttgactccaccactgagattgccatcactttccatgttacggccatcagacaaattgactggcggcacgacgaggag

SEQ ID NO: 510 - DNA, 2568 bp, synthetic construct
  misc_feature 1..2568: note = PtIP-83 polypeptide variant encoding polynucleotide
  source 1..2568: mol_type = other DNA
atggctctcgtggattacggcaagcttttcgaggatctgaaccagataagcatgggtgtactggatcgggtagagtcctcagaggtgatggtaatccacaggatgtatgtgaggctagctgatctgaatgtgggggagctccccggagccgagagggtgaagcggttgtatgtgttggcagacgtggtggagctcgcaacatttgcgcatccacagttgcttaatacgcggatgccaggatcggtgacggtgatcattctgtgtcgtcttcttcagtttccaactgatgggtcgttcgctgcttggctcgagctgccgttcatggagttgcacacactcatagaacaatacaggtcagagataaaagcagcagatgacgcgaaatggggaacgtatgtacacgcggaggaagtacagctcagcccgctgtttaatgggtggccttatctggttgttgaggcacagcgctgtattataaccgcggccatgcacaatacatttaaccgccctgggtgggttcgctccattactcaatttacaactgatcagtccggtcgggtagataccacactgctcgcacgaacagaattcggccatattgatctaccactcgaaacagattccccaacggcattcagtgtttcacaccgccaaagtacgaatttgcccgtagagtacaccggtattccagtggaggtggtgaccgatcctaacatcttgatgggcatgcaaaccagcgtgcacattgcggagctagtgaaggcatgttacccgtcaccagaattagtgagcgctgtaggggtgcacgtgaattggctcaacgaagtcttgctccgagttgtccagaaggaatctcagttgcaagggaccgaggcctacaacgagtgccttgcgcttttaggtcgctttcaatgtgtcatgaagatggggccgtttgtctcggtagtgccgcagctgcaatacagaatgtacggtagcctcatcaaccaaatggcccaagtagcacaaaactacgaccaagatttcaggcagctcaagttattcattgcccaaaaccaaatccttggcagctatttgctgcagcagaacagggcatttgctgagagggagctgcagatggagagctttcatgctgctgtcatttctcaaagaaggcaggagttggacgacgccatcgctaagatggaccgactgagcttgcagatggaggcagagagtagtgcaatggagcaagccaaaaaggaaatggacgaaggattgaggcagttccagaataggcaagttgcgaacgccctctttgccgttcttagcgctgtagctcagattgcgctcgcattcgtcacggctggtgcaacggctcctggagctgtggcgtcggcggggcaagctgtgagcatagcaggtcaggcggcgcaaggtctgcgaagggtggtggaaattctggaggggctcgaggctgtgatggaggttgtggctgctataaagcaccttgtggatgctctggaccaggtaagtcagattgtggatgcaccacctatgccagacatgccctcggaggcggactggtccatttttgtgaatgagattgaagccgtggcagagggcatgccaacggaagtctcggaggttccggtgtggagggccaagtgcaagaacgtggctgcactgggcagggagatgtgcatcacggcagtacagatgtcggagctgcagtatgacatctgggtgcaaggcatgatgcgggatatggctcgaagccaggcagacaggctggccgcaattcaacccgcggaccttaccaactatttggagatggcaatacagatggatatgcggactacgaggatgctgctggggctcctcaacatattgcgcatccagaatgcggcgctcaggtacgagtatcttctaatgcccacggagctcacaacatggccactgggtatggataccgtgggtgacttgctcatcgcgcaggagaatgctgcactgataggattaatgcagctagggccctcatctgatttcacgagcaggcatgtggtgaaagacatacctgtgaacttgctgctcgatggcgaggattgggaatttgagattcctgtgcaaggtggcatgtccagtttcccttccagctggactcgagtgcggattcggcacctggagatgcactttgtgcaggaggcgagcggtggcggcgagattatccaccagcctgccacccagacggggaccatttacatccttctgcagggttccactgtcttccatgatcgcagaagggaggaggtgatgacctttcaggcagcggttccgctcaactaccattacgcgtaccgcctcgacactggagaagccactcttacggacgagccctcggaacagtttgccaacaagttcatgcagatgacacccttcacccgttggaggcttcgtctgtctgcgtccgcagcggagaataaaggattagcctttcccacagctacagctcccgactccaccactgagattgccatcactttccatgttacggccattagacaaattgactggcggcaagaggaggag

SEQ ID NO: 511 - DNA, 2559 bp, synthetic construct
  misc_feature 1..2559: note = PtIP-83 polypeptide variant encoding polynucleotide
  source 1..2559: mol_type = other DNA
atggattacagcacgctttacagggatctgaaccagataagcatgcccctggatcgggtagagttctcagaggtgatggagatccacaggatgtatgtgaggctagctgatctgaatgtggggcagctcgagggagccgagagggtgaagcggttgtatgtgtttgcggacgtggtggagctcgcaacatttgcgcatccacagttgcttaatacgcggatgccaggatcggcgacggtgatcattctgtgtcgtcttcttcagtttccaactgatgggtcgttcgctgcttggctcgagctgccgttcatggagttgcacacactcatagaacaatacaggtcagagataaaagcagcagatgacgcgaaatggggaacgtatgtacacgcggaggaagtacagctcagcccgctgtttaatgggtggccttatctggttgttgaggcacagcgctgtattataaccgcggccatgcacaatacatttaaccgccctgggtgggttcgctccattactcaatttacaactgatcagtccggtcgggtagataccacactgctcgcacgaacagaattcggccatattgatctaccactcgaaacagattccccaacggcattcagtgtttcacaccgccaaagtacgaatttgcccgtagagtacaccggtattccagtggaggtggtgaccgatcctaacatcttgctgggcatgcagacaacggtacacattgcggagctagtcaaggcatgtcatccgtcacccgatgttgtgagcgctgtaggggtgcacgtgaattggctcaacgaagtcttgctccgagttgtccagaaggaatctcagttgcaagggaccgaggcctacaacgagtgccttgcgcttttaggtcgcattcaatgtgtcatgaagatggggccgtttgtctcggtagtgccgcagctgcaatacagaatgtatggtagcctcatcagacaaatggcccaggtagcacagaactacgaccaagatttcaggcagctcaagttattcattgcccaaaaccaaatccttggcagctatttgctgcagcagaacaaggcctttgctgacagagaggtgcagatggagagctttcatgctgctgtcatttctcaaagaagggaggagttggacaatacattcgcaaagatggaccgattgagcgggcagatggaggaagaggacagagcaatggagcaagcccgaaaagaaatggaagaaggattgaggcagttccagaataggcaagttgcgaacgccctctttgccgttcttagcgctgtagctcagattgggcttgcattccttacggctggtgcaacggctcctggggctgtggcgtcggcggggcaagctgtgagcatagcaggtcaggcggcgcaaggtctgcgaagggtggtggaaattctagaggggctcgaggctgtgatggaggttgtggctgctataaagcaccttgtggatgctctggaccaggtaagtcagattgtggatgcaccacctatgccagacatgccctcggaggcggactggagtatttttgtgaatgagattgaagccgtggcagaggggatgccgacggaagtctcggaggttccggtgtggagggccaagtgcaagaatgtggctgcactgggtcgggagatgagcatcacggcagtacagatgtcggagctccagtatgacatctgggtgcaaggcttgttgcgggatatagctcaaagccacgcagaccggctggcagcgattcaaccagctaatcttaccaactatttggagatggctacccagatggatatgcggactacgaggatgctgctggggctcctcaacataatgcgcatccagaatgcggcgctcatgtacgagtaccttctaacgcccacgcagctcactgcatggccgctgagaatggatactgtggccaacttgctcatcacgcacgagagtgctgcactgtcaggattagctcagttagggcccccatcggacttcacgagcaggcatgtagtgaaaggcatacctgtgagcttgcttctagacggtggggattgggaatttgagattcctgtgcaagctggcatgtccagcttcccttccagctggtctcgcgtccgtattcggcacctggagatgcactttgtgaaggaggccagcggtattggtggtgagattatccaccagcctgccacccagacggggaccatttacatcctcctgcagggctccactgtcttccatgatcgcagaagagaccaggtgttgccttttcaggccgctgctccgctcaactaccattacgcgtaccgcctcgacactggagaagccactcttacgaacgagccctcggaacagtttgccaacaagttcatgcagatgacaccgttcacccgttggaggcttcgtctgtctgcgtccgcagcggagaatgaaggattagcctttcccacagctacagctcccgactccaccactgagattgccatcactttccatgttacggccatcagacaaattgactggcggcaagaggaggag

SEQ ID NO: 512 - DNA, 2565 bp, synthetic construct
  misc_feature 1..2565: note = PtIP-83 polypeptide variant encoding polynucleotide
  source 1..2565: mol_type = other DNA
atggctctcgtggattacggcaagcttttcgaggatctgaaccagataagcatgcccctggatcgggtagagttttcagaggtgatggtgatccacaggatgtatgtgaggctagctgatctgaatgtgggggagctccccggagccgagagggtgaagcggttgtatgtgttggcagacgtggtggagctcgcaacatttgcgcatccacagttgcttaatacgcggatgccaggatcggtgacggtgatcattctgtgtcgtcttcttcagtttccaactgatgggtcgttcgctgcttggctcgagctgccgttcatggagttgcacacactcatagaacaatacaggtcagagataaaagcagcagatgacgcgaaatggggaacgtatgtacacgcggaggaagtacagctcagcccgctgtttaatgggtggccttatctggttgttgaggcacagcgctgtattataaccgcggccatgcacaatacatttaaccgccctgggtgggttcgctccattactcaatttacaactgatcagtccggtcgggtagataccacactgctcgcacgaacagaattcggccatattgatctaccactcgaaacagattccccaacggcattcagtgtttcacaccgccaaagtacgaatttgcccgtagagtacaccggtattccagtggaggtggtgaccgatcctaacatcttgatgggcatgcaaaccagcgtgcacattgcggagctagtgaaggcatgttacccgtcacccgatgttgtgagcgctgtaggggtgcacgtgaattggctcaacgaagtcttgctccgagttgtccagaaggaatctcagttgcaagggaccgaggcctacaacgagtgccttgcgcttttaggtcgcattcaatgtgtcatgaagatggggccgtttgtctcggtagtgccgcagctgcaatacagaatgtatggtagcctcatcagacaaatggcccaggtagcacagaactacgaccaagatttcaggcagctcaagttattcattgcccaaaaccaaatccttggcagctatttgctgcagcagaacagggcatttgctgacagagaggtgcagatggagagctttcatgctgctgtcatttctcaaagaagggaggagttggacaatacattcgcaaagatggaccgactgagcttgcagatggaggaagaggacagagcaatggagcaagcccgaaaagaaatggaagaaggattgaagcagttccagaatgagcaagttgcaagggctgtgttcgctgttcttaaatctgtagctatgattgcgctcgcattcgtcacggctggtgcaacggctcctggagctgtggcgtcggcggggcaagctgtgagcatagcaggtcaggcggcgcaaggtctgcgaagggtggtggaaattctagaggggctcgaggctgtgatggaggttgtggctgctataaagcaccttgtggatgctctggaccaggtaagtcagattgtggatgcaccacctatgccagacatgccctcggaggcggactggagtatttttgtgaatgagattgaagccgtggcagaggggatgccgacggaagtctcggaggttccggtgtggaaggccaagtgcaagaatgtggctgcactgggtagggagatgtgcatcacggcagaacagatttcccagctccagtatgacatctgggtgcaaggcatgatgcgggatatggctcgaagccaggcagacaggctggccgcaattcaacccgcggaccttaccaactatttggagatggctacccagatggatatgcggactacgaggatactgatagggctcctcaacataatgcgcatccagaatgcggcgctcaggtacgagtatcttctaatgcccacggagctcacaacatggccactgggtatggataccgtgggtgacttgctcatcgcgcaggagaatgctgcactgtcaggattagctcagttagggcccccatcggacttcacgagcaggcatgtggtgaaagacatacctgtgagcttgcttctagacggtggggattgggaatttgagattcctgtgcaaggtggcatgtccagtttcccttccagctggactcgagtgcggattcggcacctggagatgcactttgtgcaggaggcgagcggtggcggcgagattatccaccagcctgccacccagacggggaccatttacatccttctgcagggctccactgtcttccatgatcgcagaagggaggaggtgatgacctttcaggcagcggttccgctcaactaccattacgcgtaccgcctcgacaccggcgactccactctcacaaacgaaccctctgaacagtttgccaacacattcatgcagatgacaccgttcactcactggaggctacgtctgtctgcgtccgcaaaagagaatgcaggattagcctttcccacggctacagcacttgactccaccactgagattgtcatcactttccatgttacggccatcagacaaattgactggcggcacgaggaggag

SEQ ID NO: 513 - DNA, 2556 bp, synthetic construct
  misc_feature 1..2556: note = PtIP-83 polypeptide variant encoding polynucleotide
  source 1..2556: mol_type = other DNA
atggattacagcacgctttacagggatctgaaccagataagcatgcccctggatcgggtagagttctcagaggtgatggtgatccacaggatgtatgtgaggctagctgatctgaatgtggggcagctcgagggagccgagaaagtgaagcggttgtatgtgttggcagacgtggtggagctcgcaacatttgcgcatccacagttgcttaatacgcggatgccaggatcggtgacggtgatcattctgtgtcgtcttcttcagtttccaactgatgggtcgttcgctgcttggctcgagctgccgttcatggagttgcacacactcatagaacaatacaggtcagagataaaagcagcagatgacgcgaaatggggaacgtatgtacacgcggaggaagtacagctcagcccgctgtttaatgggtggccttatctggttgttgaggcacagcgctgtattataaccgcggccatgcacaatacatttaaccgccctgggtgggttcgctccattactcaatttacaactgatcagtccggtcgggtagataccacactgctcgcacgaacagaattcggccatattgatctaccactcgaaacagattccccaacggcattcagtgtttcacaccgccaaagtacgaatttgcccgtagagtacaccggtattccagtggaggtggtgaccgatcctaacatcttgatgggcatgcagacaacggtacacattgcggagctagtcaaggcatgtcatccgtcacccgatgttgtgagcgctgtaggggtgcacctgaactggctcaacgaagtcttgctccgagttgtccagaaggaatctcagttgcaagggaccgaggcctacaacgagtgccttgcgcttttaggtcgcattcaatgtgtcatgaagatggggccgtttgtctcggtagtgccgcagctgcaatacagaatgtatggtagcctcatcagacaaatggcccaggtagcacagaactacgaccaagatttcaggcagctcaagttattcattgcccaaaaccaaatccttggcagctatttgctgcagcagaacagggcatttgctgacagagaggtgcagatggagagctttcattcagcggtcatttctcaaagaagggaggagttggacaatacattcgcaaagatggaccgattgagcgggcaaatggaggcagagagtagtgcaatggagcaagccaaaaaggaaatggaagaaggattgaggcagttccagaataggcaagttgcgaacgccctctttgccgttcttagcgctgtagctcagattgggcttgcattccttacggctggtgcaacggctcctggagctgtggcgtcggcggggcaagctgtgagcatagcaggtcaggcggcgcaaggtctgcgaagggtggtggaaattctagaggggctcgaggctgtgatggaggttgtggctgctgtgaaggacctcgtggattcattggaacaggtaggtcagattgtggacgcaccggtgatgccggaattgccctcagaggcggactggtccatttttgtgaacgaggtggaggccgtggcagagggcatgccaacggaagtctcggaggttccggtgtggaaagccaagtgcaagaatgtggctgcactgggtagggagatgtgcatcacggcagtacagatgtcggagctgcagtatgacatctgggtgcaaggcatgatgcgggatatggctcgaagccaggcagacaggctggccgcaattcaacccgcggaccttaccaactatttggagatggctacccagatggatatgcggactacgaggatactgatagggctcctcaacataatgcgcatccagaatgcggcacttatgtatgagtaccttctaacgcccacgcagctcactgcatggccgctgagaatggatactgtggccaacttgctcatcacgcacgagagtgctgcactgtcaggattagctcagttagggcccccatcggacttcacgagcaggcatgtggtgaaagacatacctgtgaacttgcttctagacggtggggattgggaatttgagattcctgtgcaaggtggcatgtccagtttcccttccagctggactcgcgtccgtattcggcacctggagatgcactttgtgcaggaggcgagcggtggcggcgagattatccaccagcctgccacccagactgggaccgtttacatccttctgcagggttccactatcttccatgatcgcagaagggaggaggtgatgacctttcaggcagcggttccgctcaactaccattacgcgtaccgcctcgacaccggcgactccactctcacaaacgaaccctctgaacagtttgccaacaagttcatgcagatgacacccttcacccgttggaggctacgtctgtctgcgtccgcaaaagagaatgcaggattagcctttcccacggctacagcacttgactccaccactgagattgccatcactttccatgttacggccatcagacaaattgactggcggcaagaggaggag

SEQ ID NO: 514 - DNA, 2560 bp, synthetic construct
  misc_feature 1..2560: note = PtIP-83 polypeptide variant encoding polynucleotide
  source 1..2560: mol_type = other DNA
atggattacagcacgctttacagggatctgaaccagataagcatgcccctggatcgggtagagttttcagaggtgatggtgatccacaggatgtatgtgaggctagctgatctgaatgtggggcagctcgagggagccgagaaagtgaagcggttgtatgtgttggcagacgtggtggagctcgcaacatttgcgcatccacagttgcttaatacgcggatgccaggatcggtgacggtgatcattctgtgtcgtcttcttcagtttccaactgatgggtcgttcgctgcttggctcgagctgccgttcatggagttgcacacactcatagaacaatacaggtcagagataaaagcagcagatgacgcgaaatggggaacgtatgtacacgcggaggaagtacagctcagcccgctgtttaatgggtggccttatctggttgttgaggcacagcgctgtattataaccgcggccatgcacaatacatttaaccgccctgggtgggttcgctccattactcaatttacaactgatcagtccggtcgggtagataccacactgctcgcacgaacagaattcggccatattgatctaccactcgaaacagattccccaacggcattcagtgtttcacaccgccaaagtacgaatttgcccgtagagtacaccggtattccagtggaggtggtgaccgatcctaacatcttgatgggcatgcagacaacggtacacattgcggagctagtcaaggcatgtcatccgtcacccgatgttgtgagcgctgtaggggtgcacgtgaattggctcaacgaagtcttgctccgagttgtccagaaggaatctcagttgcaagggaccgaggcctacaacgagtgccttgcgcttttaggtcgcattcaatgtgtcatgaagatggggccgtttgtctcggtagtgccgcagctgcaatacagaatgtatggtagcctcatcagacaaatggcccaggtagcacagaactacgaccaagatttcaggcagctcaagttattcattgcccaaaaccaaatccttggcagctatttgctgcagcagaacagggcatttgctgagagggagctgcagatggagagctttcatgctgctgtcatttctcaaagaagggaggagttggacaatacattcgcaaagatggaccgattgagcgggcaaatggaggcagagagtagtgcaatggagcaagccaaaaaggaaatggacgaaggattgaggcagttccagaataggcaagttgcgaacgccctctttgccgttcttagcgctgtagctcagattgggcttgcattccttacggctggtgcaacggctcctggagctgtggcgtcggcggggcaagctgtgagcatagcaggtcaggcggcgcaaggtctgcgaagggtggtggaaattctagaggggctcgaggctgtgatggaggttgtggctgctataaagcaccttgtggatgctctggaccaggtaagtcagattgtggatgcaccacctatgccagacatgccctcagaggcggactggtccatttttgtgaatgagattgaagccgtggcagaggggatgccgacggaagtctcggaggttccggcgtggaaggccaagtgcaagaatgtggctgcactgggtagggagatgtgcatcacggcagaacagatttcccagctccagtatgacatctgggtgcaaggcttgttgcgggatatggctcgaagccaggcagacaggctggccgcaattcaacccgcggaccttaccaactatttggagatggctacccagatggatatgcggactacgaggatgctgctggggctcctcaacataatgcgcatccagaatgcggcgctcatgtatgagtatcttctaatgcccacgcagctcacaacatggccactgggtatggataccgtgggtgacttgctcatcgcgcaggagaatgctgcactgtcaggattagctcagttagggcccccatcggacttcacgagcaggcatgtagtgaaaggcatacctgtgagcttgcttctagacggtggggattgggaatttgagattcctgtgcaaggtggcatgtccagtttcccttccagctggactcgagtgcggattcggcacctggagatgcactttgtgcaggaggcgagcggtggcggcgagattatccaccagcctaccacccagacggggaccatttacatcctcctgcagggctccactgtcttccatgaccgcagaagagaccaggtgttgccttttcaggccgctgctccgctcaactaccattacgcgtaccgcctcgacactggagaagccactctcacaaacgaaccctctgaacagtttgccaacaagttcatgcagatgacacccttcacccgttggaggcttcgtctgtctgcgtccgcaaaagagaatgcaggattagcctttcccacagctacagctcccgactccaccactgagattgccatcactttccatgttacggccattagacaaattgactggcggcaagaggaggagtagc

SEQ ID NO: 515 - DNA, 2556 bp, synthetic construct
  misc_feature 1..2556: note = PtIP-83 polypeptide variant encoding polynucleotide
  source 1..2556: mol_type = other DNA
atggattacagcacgctttacagggatctgaaccagataagcatgcccctggatcgggtagagttttcagaggtgatggtgatccacaggatgtatgtgaggctagctgatctgaatgtgggggagctccccggagccgagagggtgaagcggttgtatgtgttggcagacgtggtggagctcgcaacatttgcgcatccacagttgcttaatacgcggatgccaggatcggtgacggtgatcattctgtgtcgtcttcttcagtttccaactgatgggtcgttcgctgcttggctcgagctgccgttcttggagttgcacacactcatagaacaatacaggtcagagataaaagcagcagatgacgcgaaatggggaacgtatgtacacgcggaggaagtacagctcagcccgctgtttaatgggtggccttatctggttgttgaggcacagcgctgtattataaccgcggccatgcacaatacatttaaccgccctgggtgggttcgctccattactcaatttacaactgatcagtccggtcgggtagataccacactgctcgcacgaacagaattcggccatattgatctaccactcgaaacagattccccaacggcattcagtgtttcacaccgccaaagtacgaatttgcccgtagagtacaccggtattccagtggaggtggtgaccgatcctaacatcttgatgggcatgcaaaccagcgtgcacattgcggagctagtcaaggcatgtcatccgtcacccgatgttgtgagcgctgtaggggtgcacgtgaattggctcaacgaagtcttgctccgagttgtccagaaggaatctcagttgcaagggaccgaggcctacaacgagtgccttgcgcttttaggtcgcattcaatgtgtcatgaagatggggccgtttgtctcggtagtgccgcagctgcaatacagaatgtatggtagcctcatcagacaaatggcccaagtagcacaaaactacgaccgagaattcaagcaattcaaattattcatcatccaaaatcaaatccttggcagctatttgctgcagcagaacagggcatttgctgacagagaggtgcagatggagagctttcattcagcggtcatttctcaaagaagggaggagttggacaatacattcgcaaagatggaccgattgagcgggcaaatggaggcagagagtagtgcaatggagcaagccaaaaaggaaatggacgaaggattgaggcagttccagaataggcaagttgcgaacgccctctttgccgttcttagcgctgtagctcagattgggcttgcattccttacggctggtgcaacggctcctggagctgtggcgtcggcggggcaagctgtgagcatagcaggtcaggcggcacaagctctgcgaagggtggtggaaattctagaggggctcgaggctgtgatggaggttgtggctgctataaagcaccttgtggattcattggaacaggtaggtcagattgtggacgcaccggtgatgccggaattgccctcagaggcggactggtccatttttgtgaacgaggtggaggccgtggcagagggcatgccaacggaagtctcggaggttccggcgtggaaggccaagtgcaagaatgtggctgcactgggtcgggagatgtgcatcacggcagaacagatgtcggagctgcagtatgacatctgggtgcaaggcttgttgcgggatatggctcgaagccaggcagacaggctggccgcaattcaacccgcggaccttaccaactatttggagatggcaatacagatggatatgcggactacgaggatactgatagggctcctcaacatattgcgcatccagaatgcggcgctcaggtacgagtatcttctaacgcccacggagctcacaacatggccactgggtatggataccgtgggtgacttgctcatcacgcacgagagtgctgcactgtcaggattagctcagttagggcccccatcggacttcacgagcaggcatgtagtgaaaggcatacctgtgagcttgcttctagacggtggggattgggagtttgagattcctgtgcaaggtggcatgtccagtttcccttccagctggactcgagtgcggattcggcacctggagatgcactttgtgaaggaggcgagcggtggcggcgagattatccaccagcctaccacccagacggggaccatttacatcctcctgcagggctccactgtcttccatgatcgcagaagggaggaggtgatgacctttcaggcagcggttccgctcaactaccattacgcgtaccgcctcgacactggagaagccactcttacgaacgagccctcggaacagtttgccaacaagttcatgcagatgacaccgttcacacactggaggctacgtctgtctgcgtccgcagcggagaataaaggattagcctttcccacagctacagctcccgactccaccactgagattgccatcactttccatgttacggccattagacaaattgactggcggcaagaggaggag

SEQ ID NO: 516 - DNA, 2568 bp, synthetic construct
  misc_feature 1..2568: note = PtIP-83 polypeptide variant encoding polynucleotide
  source 1..2568: mol_type = other DNA
atggctctcgtggattacggcaagcttttcgaggatctgaaccagataagcatgggtgtactggatcgggtagagttttcagaggtgatggtaatccacaggatgtacttgaggttatctgatctgaatgtgggggagctccccggagccgagagggtgaagcggttgtatgtgttggcagacgtggtggagctcgcaacatttgcgcatccacagttgcttaatacgcggatgccaggatcggtgacggtgatcattctgtgtcgtcttcttcagtttccaactgatgggtcgttcgctgcttggctcgagctgccgttcatggagttgcacacactcatagaacaatacaggtcagagataaaagcagcagatgacgcgaaatggggaacgtatgtacacgcggaggaagtacagctcagcccgctgtttaatgggtggccttatctggttgttgaggcacagcgctgtattataaccgcggccatgcacaatacatttaaccgccctgggtgggttcgctccattactcaatttacaactgatcagtccggtcgggtagataccacactgctcgcacgaacagaattcggccatattgatctaccactcgaaacagattccccaacggcattcagtgtttcacaccgccaaagtacgaatttgcccgtagagtacaccggtattccagtggaggtggtgaccgatcctaacatcttgatgggcatgcaaaccagcgtgcacattgcggagctagtgaaggcatgttacccgtcacccgatgttgtgagcgctgtaggggagcacctgaactggctcaacgaagtcttgctccgagttgtccagaaggaatctcagttgcaagggaccgaggcctacaacgagtgccttgcgcttttaggtcgcattcaatgtgtcatgaagatggtgagaattggcttagtagtgccccagctgcaatacagaatgtatggtagcctcatcagacaaatggcccaggtagcacagaactacgaccaagatttcaggcagctcaagttattcattgcccaaaatcaaatccttggcagctatttgctgcagcagaacaaggcatttgctgagagggagctgcagatggagagctttcatgctgctgtcatttctcaaagaagggaggagttggacaatacattcgcaaagatggaccgattgagcgggcaaatggaggcagagagtagtgcaatggagcaagccaaaaaggaaatggacgaaggattgaggcagttccagaatgagcaagttgcaagggctgtgttcgctgttcttaaatctgtagctatgattgcgctcgcattcgtcacggctggtgcaacggctcctggagctgtggcgtcggcggggcaagctgtgaacatagccggtcaagcggcacaagctctgcgaagggtggtggaaattctagaggggctcgaggctgtgatggaggttgtggctgctgtgaaggacctcgtggattcattggaacaggtaggtcagattgtggacgcaccggtgatgccggaattgccctcggaggcggactggagtatttttgtgaatgagattgaagccgtggcagaggggatgccggcggaagtctcggaggttccggcgtggaaggccaagtgcaagaatgtggctgcactgggtagggagatgtgcatcacggcagtacagatgtcggagctgcagtatgacatctgggtgcaaggcatgatgcgggatatggctcgaagccaggcagacaggctggccgcaattcaacccgcggaccttaccaactatttggagatggctacccagatggatatgcggactacgaggatgctgctggggctcctcaacatattgcgcatccagaatgcggcgctcaggtacgagtatcttctaatgcccacggagctcacaacatggccactgggtatggataccgtgggtgacttgctcatcgcgcaggagaatgctgcactgataggattaatgcagctagggccctcatctgatttcacgagcaggcatgtagtgaaaggcatacctgtgagcttgcttctagacggtggggattgggaatttgagattcctgtgcaaggtggcatgtccagcttcccttccagctggtctcgcgtccgtattcggcacctggagatgcactttgtgcaggaggcgagcggtggcggcgagattatccaccagcctgccacccagacggggaccatttacatcctcctgcagggctccactgtcttccatgatcgcagaagggaggaggtgatgacctttcaggcagcggttccgctcaactaccattacgcgtaccgcctcgacactggagaagccactcttacgaacgagccctcggaacagtttgctaacacattcatgcagatgacaccgttcactcactggaggctacgtctgtctgcgtccgcaaaagagaatgcaggattagcctttcccacggctacagcacttgactccactacccagattgtcatcactttccatgttacggccatcagacaaattgactggcggcaagaggaggag

SEQ ID NO: 517 - DNA, 2575 bp, synthetic construct
  misc_feature 1..2575: note = PtIP-83 polypeptide variant encoding polynucleotide
  source 1..2575: mol_type = other DNA
atggctctcgtggattacggcaagcttttcgaggatctgaaccagataagcatgggtgtactggatcgggtagagttctcagaggtgatggtgatccacaggatgtatgtgaggctagctgatctgaatgtgggggagctccccggagccgagagggtgaagcggttgtatgtgttggcagacgtggtggagctcgcaacatttgcgcatccacagttgcttaatacgcggatgccaggatcggtgacggtgatcattctgtgtcgtcttcttcagtttccaactgatgggtcgttcgctgcttggctcgagctgccgttcatggagttgcacacactcatagaacaatacaggtcagagataaaagcagcagatgacgcgaaatggggaacgtatgtacacgcggaggaagtacagctcagcccgctgtttaatgggtggccttatctggttgttgaggcacagcgctgtattataaccgcggccatgcacaatacatttaaccgccctgggtgggttcgctccattactcaatttacaactgatcagtccggtcgggtagataccacactgctcgcacgaacagaattcggccatattgatctaccactcgaaacagattccccaacggcattcagtgtttcacaccgccaaagtacgaatttgcccgtagagtacaccggtattccagtggaggtggtgaccgatcctaacatcttgatgggcatgcaaaccagcgtgcacattgcggagctagtgaaggcatgttacccgtcaccagaattagtgagcgctgtaggggtgcacgtgaattggctcaacgaagtcttgctccgagttgtccagaaggaatctcagttgcaagggaccgaggcctacaacgagtgccttgcgcttttaggtcgcattcaatgtgtcatgaagatggggccgtttgtctcggtagtgccgcagctgcaatacagaatgtacggtagcctcatcagacaaatggcccaggtagcacagaactacgaccaagatttcaggcagctcaagttattcattgcccaaaaccaaatccttggcagctatttgctgcagcagaacagggcatttgctgagagggagctgcagatggagagctttcatgctgctgtcatttctcaaagaagggaggagttggacaatacattcgcaaagatggaccgattgagcgggcaaatggaggcagagagtagtgcaatggagcaagccaaaagggaaatggacgaaggattgaggcagttccagaataggcaagttgcgaacgccctctttgccgttcttagcgctgtagctcagattgggctcgcattcgtcacggctggtgcaacggctcctggagctgtggcgtcggcggggcaagctgtgagcatagccggtcaggcggcgcaaggtctgcgaagggtggtggaaattctagagcagctggaggctgtgatggaggttgtggctgctgtgaaggacctcgtggattcattggaacaggtaggtcagattgtggacgcaccggtgatgccggaattgccctcagaggcggactggtccatttttgtgaacgaggtggaggccgtggcagagggcatgccaacggaagtctcggaggttccggtgtggagggccaagtgcaagaatgtggctgcactgggtcgggagatgagcatcacggcagtacagatttcccagctccagtatgacatctgggtgcaaggcttgttgcgggatatagctcaaagccacgcagaccggctggcagcgattcaacctgctaatcttaccaactatttggagatggcaatacagatggatatgcggactacgaggatactgatagggctcctcaacataatgcgcatccagaatgcggcacttatgtatgagtaccttctaacgcccacgcagctcactgcatggccgctgagaatggatactgtggccaacttgctcatcacgcacgagagtgctgcactgtcaggattagctcagttagggcccccatcggacttcacgagcaggcatgtggtgaaaggcatacctgtgagcttgcttctagacggtggggattgggaatttgagattcctgtgcaaggtggcatgtccagtttcccttccagctggactcgcgtccgtattcggcacctggagatgcactttgtgcaggaggccagcggtattggtggtgagattatccaccagcctaccacccagacggggaccatttacatcctcctgcagggctccactgtcttccatgatcgcagaagggaggaggtgatgacctttcaggcagcggttccgctcaactaccattacgcgtaccgcctcgacactggagaagccactcttacgaacgagccctcggaacagtttgccaacacattcatgcagatgacaccgttcactcactggaggctacgtctgtctgcgtccgcagcggagaataaaggattagcctttcccacagctacagctcccgactccaccactgagattgccatcactttccatgttacggccattagacaaattgactggcggcacgacgaagagtagc

SEQ ID NO: 518 - protein, 852 aa, synthetic construct
  REGION 1..852: note = PtIP-83 polypeptide variant
MDYSTLYRDLNQISMPLDRVEFSEVMVIHRMYLRLSDLNVGELPGAERVKRLYVLADVVELATFAHPQLLNTRMPGSVTVIILCRLLQFPTDGSFAAWLELPFMELHTLIEQYRSEIKAADDAKWGTYVHAEEVQLSPLFNGWPYLVVEAQRCIITAAMHNTFNRPGWVRSITQFTTDQSGRVDTTLLARTEFGHIDLPLETDSPTAFSVSHRQSTNLPVEYTGIPVEVVTDPNILMGMQTSVHIAELVKACYPSPELVSAVGVHVNWLNEVLLRVVQKESQLQGTEAYNECLALLGRIQCVMKMGPFVSVVPQLQYRMYGSLINQMAQVAQNYDREFKQFKLFIIQNQILGSYLLQQNRAFAERELQMESFHAAVISQRREELDNTFAKMDRLSGQMEAESSAMEQAKKEMDEGLRQFQNRQVANALFAVLSAVAQIGLAFLTAGATAPGAVASAGQAVSIAGQAAQGLRRVVEILEQLEAVMEVVAAVKDLVDALDQVSQIVDAPPMPDMPSEADWSIFVNEIEAVAEGMPTEVSEVPAWKAKCKNVAALGREMCITAEQISQLQYDIWVQGLLRDMARSQADRLAAIQPANLTNYLEMAIQMDMRTTRILIGLLNIMRIQNAALMYEYLLTPTQLTAWPLRMDTVANLLITHESAALSGLAQLGPPSDFTSRHVVKGIPVSLLLDGGDWEFEIPVQGGMSSFPSSWTRVRIRHLEMHFVQEASGGGEIIHQPATQTGTIYILLQGSTVFHDRRREEVMTFQAAVPLNYHYAYRLDTGEATLTNEPSEQFANTFMQMTPFTHWRLRLSASAAENKGLAFPTATAPDSTTEIAITFHVTAIRQIDWRQEEE

SEQ ID NO: 519 - protein, 853 aa, synthetic construct
  REGION 1..853: note = PtIP-83 polypeptide variant
MDYSTLYRDLNQISMPLDRVEFSEVMVIHRMYLRLSDLNVGELPGAERVKRLYVLADVVELATFAHPQLLNTRMPGSVTVIILCRLLQFPTDGSFAAWLELPFMELHTLIEQYRSEIKAADDAKWGTYVHAEEVQLSPLFNGWPYLVVEAQRCIITAAMHNTFNRPGWVRSITQFTTDQSGRVDTTLLARTEFGHIDLPLETDSPTAFSVSHRQSTNLPVEYTGIPVEVVTDPNILMGMQTSVHIAELVKACYPSPELVSAVGVHVNWLNEVLLRVVQKESQLQGTEAYNECLALLGRIQCVMKMGPFVSVVPQLQYRMYGSLIRQMAQVAQNYDREFKQFKLFIIQNQILGSYLLQQNRAFAERELQMESFHAAVISQRREELDNTFAKMDRLSGQMEAESSAMEQAKKEMDEGLRQFQNRQVARAVFAVLKSVAMIALAFVTAGATAPGAAASAAQAVNIAGQAAQALRRVVEILEQLEAVMEVVAAIKHLVDALDQVSQIVDAPPMPDMPSEADWSIFVNEIEAVAEGMPTEVSEVPVWRAKCKNVAALGREMSITAVQMSELQYDIWVQGMMRDMARSQADRLAAIQPADLTNYLEMATQMDMRTTRMLLGLLNIMRIQNAALMYEYLLTPTQLTAWPLRMDTVANLLITHESAALSGLAQLGPPSDFTSRHVVKGIPVSLLLDGGDWEFEIPVQGGMSSFPSSWTRVRIRHLEMHFVKEASGIGGEIIHQPATQTGTIYILLQGSTVFHDRRREEVMTFQAAVPLNYHYAYRLDTGEATLTNEPSEQFANTFMQMTPFTHWRLRLSASAAENKGLAFPTATAPDSTTEIAITFHVTAIRQIDWRQEEE

SEQ ID NO: 520 - protein, 853 aa, synthetic construct
  REGION 1..853: note = PtIP-83 polypeptide variant
MDYSTLYRDLNQISMPLDRVEFSEVMVIHRMYLRLSDLNVGELPGAERVKRLYVLADVVELATFAHPQLLNTRMPGSVTVIILCRLLQFPTDGSFAAWLELPFMELHTLIEQYRSEIKAADDAKWGTYVHAEEVQLSPLFNGWPYLVVEAQRCIITAAMHNTFNRPGWVRSITQFTTDQSGRVDTTLLARTEFGHIDLPLETDSPTAFSVSHRQSTNLPVEYTGIPVEVVTDPNILMGMQTSVQIAELVKACYPSPELVSAVGVHVNWLNEVLLRVVQKESQLQGTEAYNECLALLGRIQCVMKMGPFVSVVPQLQYRMYGSLIRQMAQVAQNYDQDFRQLKLFIAQNQILGSYLLQQNKAFADREVQMESFHSAVISQRRQELDDAIAKMDRLSLQMEEEDRAMEQARKEMEEGLKQFQNEQVARAVFAVLKSVAMIALAFVTAGATAPGAAASAAQAVNIAGQAAQALRRVVEILEGLEAVMEVVAAIKHLVDALDQVSQIVDAPPMPDMPSEADWSIFVNEIEAVAEGMPTEVSEVPAWKAKCKNVAALGREMSITAVQMSELQYDIWVQGLLRDIAQSHADRLAAIQPANLTNYLEMAIQMDMRTTRILIGLLNIMRIQNAALMYEYLLTPTQLTAWPLRMDTVANLLITHESAALSGLAQLGPPSDFTSRHVVKGIPVSLLLDGGDWEFEIPVQGGMSSFPSSWTRVRIRHLEMHFVKEASGIGGEIIHQPTTQTGTVYILLQGSTIFHDRRRDQVLPFQAAAPLNYHYAYRLDTGEATLTNEPSEQFANTFMQMTPFTHWRLRLSASAAENKGLAFPTATAPDSTTEIAITFHVTAIRQIDWRQEEE

SEQ ID NO: 521 - protein, 852 aa, synthetic construct
  REGION 1..852: note = PtIP-83 polypeptide variant
MDYSTLYRDLNQISMPLDRVEFSEVMVIHRMYLRLSDLNVGELPGAERVKRLYVLADVVELATFAHPQLLNTRMPGSVTVIILCRLLQFPTDGSFAAWLELPFMELHTLIEQYRSEIKAADDAKWGTYVHAEEVQLSPLFNGWPYLVVEAQRCIITAAMHNTFNRPGWVRSITQFTTDQSGRVDTTLLARTEFGHIDLPLETDSPTAFSVSHRQSTNLPVEYTGIPVEVVTDPNILMGMQTSVHIAELVKACYPSPELVSAVGVHVNWLNEVLLRVVQKESQLQGTEAYNECLALLGRIQCVMKMGPFVSVVPQLQYRMYGSLIRQMAQVAQNYDQDFRQLKLFIAQNQILGSYLLQQNKAFADREVQMESFHSAVISQRRQELDDAIAKMDRLSLQMEEEDRAMEQARKEMEEGLKQFQNEQVARAVFAVLKSVAMIALAFVTAGATAPGAAASAAQAVNIAGQAAQALRRVVEILEQLEAVMEVVAAVKDLVDSLEQVGQIVDAPVMPELPSEADWSIFVNEVEAVAEGMPTEVSEVPVWRAKCKNVAALGREMSITAVQMSELQYDIWVQGLLRDIAQSHADRLAAIQPANLTNYLEMAIQMDMRTTRILIGLLNIMRIQNAALMYEYLLTPTQLTAWPLRMDTVANLLITHESAALSGLAQLGPPSDFTSRHVVKGIPVSLLLDGGDWEFEIPVQAGMSSFPSSWTRVRIRHLEMHFVQEASGGGEIIHQPATQTGTIYILLQGSTVFHDRRREEVMTFQAAVPLNYHYAYRLDTGEATLTNEPSEQFANTFMQMTPFTHWRLRLSASAAENKGLAFPTATAPDSTTEIAITFHVTAIRQIDWRQEEE

SEQ ID NO: 522 - protein, 851 aa, synthetic construct
  REGION 1..851: note = PtIP-83 polypeptide variant
MDYSTLYRDLNQISMPLDRVEFSEVMVIHRMYLRLSDLNVGELPGAERVKRLYVFADVVELATFAHPQLLNTRMPGSVTVIILCRLLQFPTDGSFAAWLELPFMELHTLIEQYRSEIKAADDAKWGTYVHAEEVQLSPLFNGWPYLVVEAQRCIITAAMHNTFNRPGWVRSITQFTTDQSGRVDTTLLARTEFGHIDLPLETDSPTAFSVSHRQSTNLPVEYTGIPVEVVTDPNILMGMQTTVHIAELVKACHPSPDVVSAVGEHLNWLNKLLLPLKESTQLQGSESYKECLALLGRVHAAMKMVRIGLVVPQLQYRMYGSLINQMAQVAQNYDREFKQFKLFIIQNQILGSYLLQQNRAFAERELQMESFHSAVISQRRQELDDAIAKMDRLSLQMEEEDRAMEQARKEMEEGLKQFQNEQVARAVFAVLKSVAMIALAFVTAGATAPGAVASAGQAVSIAGQAAQGLRRVVEILEGLEAVMEVVAAIKHLVDALDQVSQIVDAPPMPDMPSEADWSIFVNEIEAVAEGMPTEVSEVPAWKAKCKNVAALGREMCITAEQISQLQYDIWVQGLLRDIAQSHADRLAAIQPANLTNYLEMAIQMDMRTTRILIGLLNIMRIQNAALMYEYLLTPTQLTAWPLRMDTVANLLITHESAALSGLAQLGPPSDFTSRHVVKGIPVSLLLDGGDWEFEIPVQGGMSSFPSSWTRVRIRHLEMHFVQEASGGGEIIHQPATQTGTIYILLQGSTIFHDRRRDQVLPFQAAAPLNYHYAYRLDTGDSTLTNEPSEQFANKFMQMTPFTRWRLRLSASAAENKGLAFPTATAPDSTTEIAITFHVTAIRQIDWRQEEE

SEQ ID NO: 523 - protein, 853 aa, synthetic construct
  REGION 1..853: note = PtIP-83 polypeptide variant
MDYSTLYRDLNQISMPLDRVEFSEVMVIHRMYLRLSDLNVGELPGAERVKRLYVLADVVELATFAHPQLLNTRMPGSVTVIILCRLLQFPTDGSFAAWLELPFMELHTLIEQYRSEIKAADDAKWGTYVHAEEVQLSPLFNGWPYLVVEAQRCIITAAMHNTFNRPGWVRSITQFTTDQSGRVDTTLLARTEFGHIDLPLETDSPTAFSVSHRQSTNLPVEYTGIPVEVVTDPNILMGMQTSVHIAELVKACHPSPDVVSAVGVHVNWLNEVLLRVVQKESQLQGTEAYNECLALLGRIQCVMKMGPFVSVVPQLQYRMYGSLIRQMAQVAQNYDQDFRQLKLFIAQNQILGSYLLQQNKAFADREVQMESFHSAVISQRRQELDDAIAKMDRLSLQMEEEDRAMEQARKEMEEGLKQFQNEQVARAVFAVLKSVAMIALAFVTAGATAPGAAASAAQAVNIAGQAAQALRRVVEILEQLEAVMEVVAAVKDLVDSLDQVGQIVDAPVMPELPSEADWSIFVNEVEAVAEGMPTEVSEVPAWKAKCKNVAALGREMCITAEQISQLQYDIWVQGLLRDIAQSHADRLAAIQPANLTNYLEMAIQMDMRTTRILIGLLNIMRIQNAALMYEYLLTPTQLTAWPLRMDTVANLLITHESAALSGLAQLGPPSDFTSRHVVKDIPVNLLLDGEDWEFEIPVQAGMSSFPSSWSRVRIRHLEMHFVKEASGIGGEIIHQPTTQTGTVYILLQGSTIFHDRRRDQVLPFQAAAPLNYHYAYRLDTGDSTLTNEPSEQFANKFMQMTPFTRWRLRLSASAKENAGLAFPTATALDSTTQIVITFHVTAIRQIDWRHDEE

SEQ ID NO: 524 - protein, 853 aa, synthetic construct
  REGION 1..853: note = PtIP-83 polypeptide variant
MDYSTLYRDLNQISMPLDRVEFSEVMVIHRMYLRLSDLNVGELPGAEKVKRLYVLADVVELATFAHPQLLNTRMPGSVTVIILCRLLQFPTDGSFAAWLELPFMELHTLIEQYRSEIKAADDAKWGTYVHAEEVQLSPLFNGWPYLVVEAQRCIITAAMHNTFNRPGWVRSITQFTTDQSGRVDTTLLARTEFGHIDLPLETDSPTAFSVSHRQSTNLPVEYTGIPVEVVTDPNILMGMQTSVHIAELVKACYPSPELVSAVGVHVNWLNEVLLRVVQKESQLQGTEAYNECLALLGRIQCVMKMGPFVSVVPQLQYRMYGSLIRQMAQVAQNYDQDFRQLKLFIAQNQILGSYLLQQNKAFADREVQMESFHSAVISQRRQELDDAIAKMDRLSLQMEEEDRAMEQAKKEMDEGLRQFQNRQVANALFAVLSAVAQIGLAFLTAGATAPGAVASAGQAVSIAGQAAQGLRRVVEILEQLEAVMEVVAAIKHLVDALDQVSQIVDAPPMPDMPSEADWSIFVNEIEAVAEGMPTEVSEVPAWKAKCKNVAALGREMCITAEQISQLQYDIWVQGLLRDIAQSQADRLAAIQPADLTNYLEMATQMDMRTTRMLLGLLNILRIQNAALRYEYLLMPTELTTWPLGMDTVGDLLIAQENAALIGLMQLGPSSDFTSRHVVKDIPVNLLLDGEDWEFEIPVQAGMSSFPSSWSRVRIRHLEMHFVKEASGIGGEIIHQPTTQTGTVYILLQGSTIFHDRRRDQVLPFQAAAPLNYHYAYRLDTGEATLTNEPSEQFANTFMQMTPFTHWRLRLSASAAENKGLAFPTATAPDSTTEIAITFHVTAIRQIDWRQEEE

SEQ ID NO: 525 - protein, 853 aa, synthetic construct
  REGION 1..853: note = PtIP-83 polypeptide variant
MDYSTLYRDLNQISMPLDRVEFSEVMVIHRMYVRLADLNVGELPGAEKVKRLYVLADVVELATFAHPQLLNTRMPGSVTVIILCRLLQFPTDGSFAAWLELPFMELHTLIEQYRSEIKAADDAKWGTYVHAEEVQLSPLFNGWPYLVVEAQRCIITAAMHNTFNRPGWVRSITQFTTDQSGRVDTTLLARTEFGHIDLPLETDSPTAFSVSHRQSTNLPVEYTGIPVEVVTDPNILMGMQTSVHIAELVKACYPSPELVSAVGVHVNWLNEVLLRVVQKESQLQGTEAYNECLALLGRIQCVMKMGPFVSVVPQLQYRMYGSLIRQMAQVAQNYDQDFRQLKLFIAQNQILGSYLLQQNKAFADREVQMESFHSAVISQRRQELDDAIAKMDRLSLQMEEEDRAMEQARKEMEEGLKQFQNEQVARAVFAVLKSVAMIALAFVTAGATAPGAAASAAQAVNIAGQAAQALRRVVEILEQLEAVMEVVAAVKDLVDSLEQVGQIVDAPVMPELPSEADWSIFVNEVEAVAEGMPTEVSEVPAWKAKCKNVAALGREMSITAEQISQLQYDIWVQGLLRDIAQSHADRLAAIQPANLTNYLEMAIQMDMRTTRILIGLLNIMRIQNAALMYEYLLTPTQLTAWPLRMDTVANLLITHESAALSGLAQLGPPSDFTSRHVVKGIPVSLLLDGGDWEFEIPVQGGMSSFPSSWTRVRIRHLEMHFVKEASGIGGEIIHQPTTQTGTIYILLQGSTVFHDRRREEVMTFQAAVPLNYHYAYRLDTGDSTLTNEPSEQFANKFMQMTPFTRWRLRLSASAKENAGLAFPTATALDSTTQIVITFHVTAIRQIDWRHDEE

SEQ ID NO: 526 - protein, 852 aa, synthetic construct
  REGION 1..852: note = PtIP-83 polypeptide variant
MDYSTLYRDLNQISMPLDRVEFSEVMVIHRMYLRLSDLNVGELPGAERVKRLYVLADVVELATFAHPQLLNTRMPGSVTVIILCRLLQFPTDGSFAAWLELPFMELHTLIEQYRSEIKAADDAKWGTYVHAEEVQLSPLFNGWPYLVVEAQRCIITAAMHNTFNRPGWVRSITQFTTDQSGRVDTTLLARTEFGHIDLPLETDSPTAFSVSHRQSTNLPVEYTGIPVEVVTDPNILLGMQTSVHIAELVKACYPSPELVSAVGVHVNWLNKLLLPLKESTQLQGSESYKECLALLGRVHAAMKMVRIGLVVPQLQYRMYGSLINQMAQVAQNYDREFKQLKLFIAQNQILGSYLLQQNRAFAERELQMESFHSAVISQRRQELDDAIAKMDRLSLQMEEEDRAMEQARKEMEEGLKQFQNEQVARAVFAVLKSVAMIALAFVTAGATAPGAAASAAQAVNIAGQAAQALRRVVEILEGLEAVMEVVAAIKHLVDALDQVSQIVDAPPMPDMPSEADWSIFVNEIEAVAEGMPTEVSEVPAWKAKCKNVAALGREMCITAEQISQLQYDIWVQGLLRDIAQSHADRLAAIQPANLTNYLEMAIQMDMRTTRILIGLLNIMRIQNAALMYEYLLTPTQLTAWPLRMDTVANLLITHESAALSGLAQLGPPSDFTSRHVVKGIPVSLLLDGGDWEFEIPVQGGMSSFPSSWTRVRIRHLEMHFVQEASGIGGEIIHQPATQTGTIYILLQGSTVFHDRRREEVMTFQAAVPLNYHYAYRLDTGEATLTNEPSEQFANTFMQMTPFTHWRLRLSASAAENKGLAFPTATAPDSTTEIAITFHVTAIRQIDWRQEEE

SEQ ID NO: 527 - protein, 834 aa, synthetic construct
  REGION 1..834: note = PtIP-83 polypeptide variant
MDYSTLYRDLNQISMPLDRVEFSEVMVIHRMYLRLSDLNVGELPGAERVKRLYVLADVVELATFAHPQLLNTRMPGSVTVIILCRLLQFPTDGSFAAWLELPFMELHTLIEQYRSEIKAADDAKWGTYVHAEEVQLSPLFNGWPYLVVEAQRCIITAAMHNTFNRPGWVRSITQFTTDQSGRVDTTLLARTEFGHIDLPLETDSPTAFSVSHRQSTNLPVEYTGIPVEVVTDPNILMGMQTSVHIAELVKACYPSPELVSAVGVHVNWLNEVLLRVVQKESQLQGTEAYNECLALLGRIQCVMKMGPFVSVVPQLQYRMYGSLIRQMAQVAQNYDQDFRQLKLFIAQNQILGSYLLQQNKAFADREVQMESFHSAVISQRRQELDDAIAKMDRLSLQMEEEDRAMEQARKEMEEGLKQFQNEQVARAMFTACAADAAAQAVSIAGQAAQGLRRVVEILEQLEAVMEVVAAIKHLVDALDQVSQIVDAPVMPELPSEADWSIFVNEVEAVAEGMPTEVSEVPVWRAKCKNVAALGREMCITAEQISQLQYDIWVQGLLRDIAQSHADRLAAIQPANLTNYLEMAIQMDMRTTRILIGLLNIMRIQNAALMYEYLLTPTELTTWPLGMDTVGDLLIAQENAALIGLMQLGPSSDFTSRHVVKDIPVNLLLDGEDWEFEIPVQAGMSSFPSSWSRVRIRHLEMHFVKEASGIGGEIIHQPTTQTGTVYILLQGSTIFHDRRRDQVLPFQAAAPLNYHYAYRLDTGEATLTNEPSEQFANTFMQMTPFTHWRLRLSASAAENKGLAFPTATAPDSTTEIAITFHVTAIRQIDWRQEEE

SEQ ID NO: 528 - protein, 853 aa, synthetic construct
  REGION 1..853: note = PtIP-83 polypeptide variant
MDYSTLYRDLNQISMPLDRVEFSEVMVIHRMYLRLSDLNVGELPGAERVKRLYVLADVVELATFAHPQLLNTRMPGSVTVIILCRLLQFPTDGSFAAWLELPFMELHTLIEQYRSEIKAADDAKWGTYVHAEEVQLSPLFNGWPYLVVEAQRCIITAAMHNTFNRPGWVRSITQFTTDQSGRVDTTLLARTEFGHIDLPLETDSPTAFSVSHRQSTNLPVEYTGIPVEVVTDPNILMGMQTSVHIAELVKACYPSPELVSAVGVHVNWLNEVLLRVVQKESQLQGTEAYNECLALLGRIQCVMKMVRIGLVVPQLQYRMYGSLINQMAQVAQNYDREFKQFKLFIIQNQILGSYLLQQNRAFAERELQMESFHAAVISQRREELDNTFAKMDRLSGQMEAESSAMEQAKKEMDEGLRQFQNRQVANALFAVLSAVAQIGLAFLTAGATAPGAVASAGQAVSIAGQAAQGLRRVVEILEQLEAVMEVVAAVKDLVDSLEQVGQIVDAPVMPELPSEADWSIFVNEIEAVAEGMPTEVSEVPAWKAKCKNVAALGREMCITAEQISQLQYDIWVQGLLRDIAQSHADRLAAIQPANLTNYLEMAIQMDMRTTRILIGLLNIMRIQNAALMYEYLLTPTELTTWPLGMDTVGDLLIAQENAALIGLMQLGPSSDFTSRHVVKDIPVNLLLDGEDWEFEIPVQAGMSSFPSSWSRVRIRHLEMHFVKEASGIGGEIIHQPTTQTGTVYILLQGSTIFHDRRRDQVLPFQAAAPLNYHYAYRLDTGDSTLTNEPSEQFANKFMQMTPFTRWRLRLSASAKENAGLAFPTATALDSTTQIVITFHVTAIRQIDWRHDEE

SEQ ID NO: 529 - protein, 853 aa, synthetic construct
  REGION 1..853: note = PtIP-83 polypeptide variant
MDYSTLYRDLNQISMPLDRVEFSEVMVIHRMYLRLSDLNVGELPGAEKVKRLYVLADVVELATFAHPQLLNTRMPGSVTVIILCRLLQFPTDGSFAAWLELPFMELHTLIEQYRSEIKAADDAKWGTYVHAEEVQLSPLFNGWPYLVVEAQRCIITAAMHNTFNRPGWVRSITQFTTDQSGRVDTTLLARTEFGHIDLPLETDSPTAFSVSHRQSTNLPVEYTGIPVEVVTDPNILMGMQTSVHIAELVKACYPSPELVSAVGVHVNWLNEVLLRVVQKESQLQGTEAYNECLALLGRIQCVMKMGPFVSVVPQLQYRMYGSLIRQMAQVAQNYDQDFRQLKLFIAQNQILGSYLLQQNRAFAERELQMESFHAAVISQRREELDNTFAKMDRLSGQMEAESSAMEQAKKEMDEGLRQFQNRQVANALFAVLSAVAQIGLAFLTAGATAPGAVASAGQAVSIAGQAAQGLRRVVEILEQLEAVMEVVAAVKDLVDSLEQVGQIVDAPVMPELPSEADWSIFVNEVEAVAEGMPTEVSEVPVWRAKCKNVAALGREMCITAEQISQLQYDIWVQGLLRDIAQSHADRLAAIQPADLTNYLEMATQMDMRTTRMLLGLLNILRIQNAALRYEYLLMPTELTTWPLGMDTVGDLLIAQENAALIGLMQLGPSSDFTSRHVVKDIPVNLLLDGEDWEFEIPVQAGMSSFPSSWSRVRIRHLEMHFVKEASGIGGEIIHQPTTQTGTVYILLQGSTIFHDRRRDQVLPFQAAAPLNYHYAYRLDTGDSTLTNEPSEQFANKFMQMTPFTRWRLRLSASAAENKGLAFPTATAPDSTTEIAITFHVTAIRQIDWRQEEE

SEQ ID NO: 530 - protein, 853 aa, synthetic construct
  REGION 1..853: note = PtIP-83 polypeptide variant
MDYSTLYRDLNQISMPLDRVEFSEVMVIHRMYLRLSDLNVGELPGAERVKRLYVLADVVELATFAHPQLLNTRMPGSVTVIILCRLLQFPTDGSFAAWLELPFMELHTLIEQYRSEIKAADDAKWGTYVHAEEVQLSPLFNGWPYLVVEAQRCIITAAMHNTFNRPGWVRSITQFTTDQSGRVDTTLLARTEFGHIDLPLETDSPTAFSVSHRQSTNLPVEYTGIPVEVVTDPNILMGMQTSVHIAELVKACYPSPELVSAVGEHVNWLNEVLLRVVQKESQLQGTEAYNECLALLGRIQCVMKMGPFVSVVPQLQYRMYGSLINQMAQVAQNYDREFKQFKLFIIQNQILGSYLLQQNRAFAERELQMESFHAAVISQRREELDNTFAKMDRLSGQMEAESSAMEQAKKEMDEGLRQFQNRQVANALFAVLSAVAQIGLAFLTAGATAPGAVASAGQAVSIAGQAAQGLRRVVEILEGLEAVMEVVAAVKDLVDSLEQVGQIVDAPVMPELPSEADWSIFVNEVEAVAEGMPTEVSEVPVWRAKCKNVAALGREMCITAEQISQLQYDIWVQGLLRDIAQSHADRLAAIQPANLTNYLEMATQMDMRTTRMLLGLLNILRIQNAALRYEYLLMPTELTTWPLGMDTVGDLLIAQENAALIGLMQLGPSSDFTSRHVVKDIPVNLLLDGEDWEFEIPVQAGMSSFPSSWSRVRIRHLEMHFVKEASGIGGEIIHQPTTQTGTVYILLQGSTIFHDRRRDQVLPFQAAAPLNYHYAYRLDTGDSTLTNEPSEQFANKFMQMTPFTRWRLRLSASAKENAGLAFPTATALDSTTQIVITFHVTAIRQIDWRHDEE

SEQ ID NO: 531 - protein, 853 aa, synthetic construct
  REGION 1..853: note = PtIP-83 polypeptide variant
MDYSTLYRDLNQISMPLDRVEFSEVMVIHRMYLRLSDLNVGELPGAERVKRLYVLADVVELATFAHPQLLNTRMPGSVTVIILCRLLQFPTDGSFAAWLELPFMELHTLIEQYRSEIKAADDAKWGTYVHAEEVQLSPLFNGWPYLVVEAQRCIITAAMHNTFNRPGWVRSITQFTTDQSGRVDTTLLARTEFGHIDLPLETDSPTAFSVSHRQSTNLPVEYTGIPVEVVTDPNILMGMQTSVHIAELVKACYPSPELVSAVGVHVNWLNEVLLRVVQKESQLQGTEAYNECLALLGRIQCVMKMGPFVSVVPQLQYRMYGSLIRQMAQVAQNYDQDFRQLKLFIAQNQILGSYLLQQNKAFADREVQMESFHSAVISQRRQELDDAIAKMDRLSLQMEEEDRAMEQARKEMEEGLKQFQNEQVARAVFAVLKSVAMIALAFVTAGATAPGAAASAAQAVNIAGQAAQALRRVVEILEGLEAVMEVVAAVKDLVDSLEQVGQIVDAPVMPELPSEADWSIFVNEVEAVAEGMPTEVSEVPVWKAKCKNVAALGREMSITAVQMSELQYDIWVQGMMRDMARSQADRLAAIQPADLTNYLEMATQMDMRTTRMLLGLLNILRIQNAALRYEYLLMPTELTTWPLGMDTVGDLLIAQENAALIGLMQLGPSSDFTSRHVVKDIPVNLLLDGEDWEFEIPVQAGMSSFPSSWSRVRIRHLEMHFVKEASGIGGEIIHQPTTQTGTVYILLQGSTIFHDRRRDQVLPFQAAAPLNYHYAYRLDTGEATLTNEPSEQFANTFMQMTPFTHWRLRLSASAAENKGLAFPTATAPDSTTEIAITFHVTAIRQIDWRQEEE

SEQ ID NO: 532 - protein, 853 aa, synthetic construct
  REGION 1..853: note = PtIP-83 polypeptide variant
MDYSTLYRDLNQISMPLDRVEFSEVMVIHRMYLRLSDLNVGQLEGAERVKRLYVFADVVELATFAHPQLLNTRMPGSVTVIILCRLLQFPTDGSFAAWLELPFMELHTLIEQYRSEIKAADDAKWGTYVHAEEVQLSPLFNGWPYLVVEAQRCIITAAMHNTFNRPGWVRSITQFTTDQSGRVDTTLLARTEFGHIDLPLETDSPTAFSVSHRQSTNLPVEYTGIPVEVVTDPNILMGMQTSVHIAELVKACYPSPELVSAVGVHVNWLNEVLLRVVQKESQLQGTEAYNECLALLGRIQCVMKMGPFVSVVPQLQYRMYGSLINQMAQVAQNYDREFKQFKLFIIQNQILGSYLLQQNRAFADREVQMESFHSAVISQRRQELDDAIAKMDRLSLQMEEEDRAMEQARKEMEEGLKQFQNEQVARAVFAVLSAVAQIGLAFLTAGATAPGAVASAGQAVSIAGQAAQGLRRVVEILEGLEAVMEVVAAIKHLVDALDQVSQIVDAPPMPDMPSEADWSIFVNEIEAVAEGMPTEVSEVPAWKAKCKNVAALGREMCITAEQISQLQYDIWVQGLLRDIAQSHADRLAAIQPANLTNYLEMAIQMDMRTTRILIGLLNIMRIQNAALMYEYLLTPTQLTAWPLRMDTVANLLITHESAALSGLAQLGPPSDFTSRHVVKGIPVSLLLDGGDWEFEIPVQAGMSSFPSSWSRVRIRHLEMHFVKEASGIGGEIIHQPATQTGTVYILLQGSTIFHDRRRDQVLPFQAAAPLNYHYAYRLDTGDSTLTNEPSEQFANKFMQMTPFTRWRLRLSASAKENAGLAFPTATALDSTTQIVITFHVTAIRQIDWRHDEE

SEQ ID NO: 533 - protein, 852 aa, synthetic construct
  REGION 1..852: note = PtIP-83 polypeptide variant
MDYSTLYRDLNQISMPLDRVEFSEVMVIHRMYLRLSDLNVGELPGAERVKRLYVLADVVELATFAHPQLLNTRMPGSVTVIILCRLLQFPTDGSFAAWLELPFMELHTLIEQYRSEITAADDAKWGTYVHAEEVQLSPLFNGWPYLVVEAQRCIITAAMHNTFNRPGWVRSITQFTTDQSGRVDTTLLARTEFGHIDLPLETDSPTAFSVSHRQSTNLPVEYTGIPVEVVTDPNILMGMQTSVHIAELVKACYPSPELVSAVGEHVNWLNEVLLRVVQKESQLQGTEAYNECLALLGRIQCVMKMGPFVSVVPQLQYRMYGSLIRQMAQVAQNYDQDFRQLKLFIAQNQILGSYLLQQNKAFADREVQMESFHSAVISQRRQELDDAIAKMDRLSLQMEEEDRAMEQARKEMEEGLKQFQNEQVARAVFAVLKSVAMIALAFVTAGATAPGAAASAAQAVNIAGQAAQALRRVVEILEGLEAVMEVVAAIKHLVDALDQVSQIVDAPPMPDMPSEADWSIFVNEIEAVAEGMPTEVSEVPVWRAKCKNVAALGREMSITAVQMSELQYDIWVQGMMRDMARSQADRLAAIQPADLTNYLEMATQMDMRTTRMLLGLLNIMRIQNAALMYEYLLTPTQLTAWPLRMDTVANLLITHESAALSGLAQLGPPSDFTSRHVVKGIPVSLLLDGGDWEFEIPVQGGMSSFPSSWTRVRIRHLEMHFVQEASGGGEIIHQPATQTGTIYILLQGSTVFHDRRREEVMTFQAAVPLNYHYAYRLDTGEATLTNEPSEQFANTFMQMTPFTHWRLRLSASAAENKGLAFPTATAPDSTTEIAITFHVTAIRQIDWRQEEE

SEQ ID NO: 534 - protein, 852 aa, synthetic construct; identical to SEQ ID NO: 521
  REGION 1..852: note = PtIP-83 polypeptide variant

SEQ ID NO: 535 - protein, 852 aa, synthetic construct
  REGION 1..852: note = PtIP-83 polypeptide variant
MDYSTLYRDLNQISMPLDRVEFSEVMVIHRMYLRLSDLNVGELPGAERVKRLYVFADVVELATFAHPQLLNTRMPGSVTVIILCRLLQFPTDGSFAAWLELPFMELHTLIEQYRSEIKAADDAKWGTYVHAEEVQLSPLFNGWPYLVVEAQRCIITAAMHNTFNRPGWVRSITQFTTDQSGRVDTTLLARTEFGHIDLPLETDSPTAFSVSHRQSTNLPVEYTGIPVEVVTDPNILMGMQTSVHIAELVKACYPSPELVSAVGVHVNWLNEVLLRVVQKESQLQGTEAYNECLALLGRIQCVMKMGPFVSVVPQLQYRMYGSLIRQMAQVAQNYDQDFRQLKLFIAQNQILGSYLLQQNKAFADREVQMESFHSAVISQRRQELDDAIAKMDRLSLQMEEEDRAMEQARKEMEEGLKQFQNEQVARAVFAVLKSVAMIALAFVTAGATAPGAAASAAQAVNIAGQAAQALRRVVEILEGLEAVMEVVAAIKHLVDALDQVSQIVDAPPMPDMPSEADWSIFVNEIEAVAEGMPTEVSEVPAWKAKCKNVAALGREMSITAVQMSELQYDIWVQGMMRDMARSQADRLAAIQPADLTNYLEMATQMDMRTTRMLLGLLNIMRIQNAALMYEYLLTPTQLTAWPLRMDTVANLLITHESAALSGLAQLGPPSDFTSRHVVKGIPVSLLLDGGDWEFEIPVQGGMSSFPSSWTRVRIRHLEMHFVQEASGGGEIIHQPATQTGTIYILLQGSTVFHDRRREEVMTFQAAVPLNYHYAYRLDTGEATLTNEPSEQFANKFMQMTPFTRWRLRLSASAKENVGLAFPTATALDSTTEIAITFHVTAIRQIDWRQEEE

SEQ ID NO: 536 - protein, 853 aa, synthetic construct
  REGION 1..853: note = PtIP-83 polypeptide variant
MDYSTLYRDLNQISMPLDRVEFSEVMVIHRMYLRLSDLNVGELPGAERVKRLYVLADVVELATFAHPQLLNTRMPGSVTVIILCRLLQFPTDGSFAAWLELPFMELHTLIEQYRSEIKAADDAKWGTYVHAEEVQLSPLFNGWPYLVVEAQRCIITAAMHNTFNRPGWVRSITQFTTDQSGRVDTTLLARTEFGHIDLPLETDSPTAFSVSHRQSTNLPVEYTGIPVEVVTDPNILMGMQTSVHIAELVKACYPSPELVSAVGEHLNWLNEVLLRVVQKESQLQGTEAYNECLALLGRIQCVMKMGPFVSVVPQLQYRMYGSLIRQMAQVAQNYDQDFRQLKLFIAQNQILGSYLLQQNKAFADREVQMESFHSAVISQRRQELDDAIAKMDRLSLQMEEEDRAMEQARKEMEEGLKQFQNEQVARAVFAVLKSVAMIALAFVTAGATAPGAAASAAQAVNIAGQAAQALRRVVEILEGLEAVMEVVAAVKDLVDSLEQVGQIVDAPVMPELPSEADWSIFVNEVEAVAEGMPTEVSEVPVWRAKCKNVAALGREMSITAVQMSELQYDIWVQGMMRDMARSQADRLAAIQPADLTNYLEMATQMDMRTTRMLLGLLNILRIQNAALRYEYLLMPTELTTWPLGMDTVGDLLIAQENAALIGLMQLGPSSDFTSRHVVKDIPVNLLLDGEDWEFEIPVQAGMSSFPSSWSRVRIRHLEMHFVKEASGIGGEIIHQPTTQTGTIYILLQGSTVFHDRRREEVMTFQAAVPLNYHYAYRLDTGEATLTNEPSEQFANTFMQMTPFTHWRLRLSASAAENKGLAFPTATAPDSTTEIAITFHVTAIRQIDWRQEEE

SEQ ID NO: 537 - protein, 852 aa, synthetic construct
  REGION 1..852: note = PtIP-83 polypeptide variant
MDYSTLYRDLNQISMPLDRVEFSEVMVIHRMYLRLSDLNVGELPGAERVKRLYVLADVVELATFAHPQLLNTRMPGSVTVIILCRLLQFPTDGSFAAWLELPFMELHTLIEQYRSEIKAADDAKWGTYVHAEEVQLSPLFNGWPYLVVEAQRCIITAAMHNTFNRPGWVRSITQFTTDQSGRVDTTLLARTEFGHIDLPLETDSPTAFSVSHRQSTNLPVEYTGIPVEVVTDPNILMGMQTSVHIAELVKACYPSPELVSAVGVHVNWLNEVLLRVVQKESQLQGTEAYNECLALLGRIQCVMKMGPFVSVVPQLQYRMYGSLIRQMAQVAQNYDQDFRQLKLFIAQNQILGSYLLQQNKAFADREVQMESFHSAVISQRRQELDDAIAKMDRLSLQMEEEDRAMEQARKEMEEGLKQFQNRQVANALFAVLSAVAQIGLAFLTAGATAPGAAASAAQAVNIAGQAAQGLRRVVEILEQLEAVMEVVAAVKDLVDSLEQVGQIVDAPVMPELPSEADWSIFVNEVEAVAEGMPTEVSEVPVWRAKCKNVAALGREMCITAEQISQLQYDIWVQGLLRDIAQSHADRLAAIQPANLTNYLEMAIQMDMRTTRILIGLLNIMRIQNAALMYEYLLTPTQLTAWPLRMDTVANLLITHESAALSGLAQLGPPSDFTSRHVVKGIPVSLLLDGGDWEFEIPVQGGMSSFPSSWTRVRIRHLEMHFVQEASGGGEIIHQPATQTGTIYILLQGSTVFHDRRREEVMTFQAAVPLNYHYAYRLDTGEATLTNEPSEQFANTFMQMTPFTHWRLRLSASAAENKGLAFPTATAPDSTTEIAITFHVTAIRQIDWRHDEE

SEQ ID NO: 538 - protein, 853 aa, synthetic construct
  REGION 1..853: note = PtIP-83 polypeptide variant
MDYSTLYRDLNQISMPLDRVEFSEVMVIHRMYLRLSDLNVGELPGAERVKRLYVLADVVELATFAHPQLLNTRMPGSVTVIILCRLLQFPTDGSFAAWLELPFMELHTLIEQYRSEIKAADDAKWGTYVHAEEVQLSPLFNGWPYLVVEAQRCIITAAMHNTFNRPGWVRSITQFTTDQSGRVDTTLLARTEFGHIDLPLETDSPTAFSVSHRQSTNLPVEYTGIPVEVVTDPNILMGMQTSVHIAELVKACYPSPELVSAVGVHVNWLNEVLLRVVQKESQLQGTEAYNECLALLGRIQCVMKMGPFVSVVPQLQYRMYGSLIRQMAQVAQNYDQDFRQLKLFIAQNQILGSYLLQQNRAFADREVQMESFHSAVISQRRQELDDAIAKMDRLSLQMEEEDRAMEQARKEMEEGLKQFQNEQVARAVFAVLKSVAMIALAFVTAGATAPGAAASAAQAVSIAGQAAQGLRRVVEILEQLEAVMEVVAAVKDLVDSLEQVGQIVDAPVMPELPSEADWSIFVNEVEAVAEGMPTEVSEVPVWRAKCKNVAALGREMSITAVQMSELQYDIWVQGLLRDIAQSHADRLAAIQPANLTNYLEMAIQMDMRTTRILIGLLNIMRIQNAALMYEYLLTPTQLTAWPLRMDTVANLLITHESAALSGLAQLGPSSDFTSRHVVKDIPVNLLLDGEDWEFEIPVQAGMSSFPSSWSRVRIRHLEMHFVKEASGIGGEIIHQPTTQTGTVYILLQGSTIFHDRRRDQVLPFQAAAPLNYHYAYRLDTGDSTLTNEPSEQFANKFMQMTPFTRWRLRLSASAKENAGLAFPTATALDSTTQIVITFHVTAIRQIDWRHDEE

SEQ ID NO: 539 - protein, 852 aa, synthetic construct
  REGION 1..852: note = PtIP-83 polypeptide variant
MDYSTLYRDLNQISMPLDRVEFSEVMVIHRMYLRLSDLNVGELPGAERVKRLYVLADVVELATFAHPQLLNTRMPGSVTVIILCRLLQFPTDGSFAAWLELPFMELHTLIEQYRSEIKAADDAKWGTYVHAEEVQLSPLFNGWPYLVVEAQRCIITAAMHNTFNRPGWVRSITQFTTDQSGRVDTTLLARTEFGHIDLPLETDSPTAFSVSHRQSTNLPVEYTGIPVEVVTDPNILMGMQTSVHIAELVKACYPSPELVSAVGVHVNWLNEVLLRVVQKESQLQGTEAYNECLALLGRIQCVMKMGPFVSVVPQLQYRMYGSLIRQMAQVAQNYDQDFRQLKLFIAQNQILGSYLLQQNKAFADREVQMESFHSAVISQRRQELDDAIAKMDRLSLQMEEEDRAMEQARKEMEEGLKQFQNEQVARAVFAVLKSVAMIALAFVTAGATAPGAAASAAQAVNIAGQAAQGLRRVVEILEQLEAVMEVVAAVKDLVDSLEQVGQIVDAPVMPELPSEADWSIFVNEIEAVAEGMPTEVSEVPVWRAKCKNVAALGREMCITAEQISQLQYDIWVQGLLRDIAQSHADRLAAIQPANLTNYLEMAIQMDMRTTRILIGLLNIMRIQNAALMYEYLLTPTQLTAWPLRMDTVANLLITHESAALSGLAQLGPPSDFTSRHVVKGIPVSLLLDGGDWEFEIPVQGGMSSFPSSWTRVRIRHLEMHFVQEASGGGEIIHQPATQTGTIYILLQGSTVFHDRRREEVMTFQAAVPLNYHYAYRLDTGDSTLTNEPSEQFANKFMQMTPFTHWRLRLSASAAENKGLAFPTATAPDSTTEIAITFHVTAIRQIDWRQEEE

SEQ ID NO: 540 - protein, 852 aa, synthetic construct
  REGION 1..852: note = PtIP-83 polypeptide variant
MDYSTLYRDLNQISMPLDRVEFSEVMVIHRMYLRLSDLNVGQLEGAEKVKRLYVLADVVELATFAHPQLLNTRMPGSVTVIILCRLLQWPTDGSFAAWLELPFMELHTLIEQYRSEIKAADDAKWGTYVHAEEVQLSPLFNGWPYLVVEAQRCIITAAMHNTFNRPGWVRSITQFTTDQSGRVDTTLLARTEFGHIDLPLETDSPTAFSVSHRQSTNLPVEYTGIPVEVVTDPNILMGMQTSVHIAELVKACYPSPELVSAVGVHVNWLNEVLLRVVQKESQLQGTEAYNECLALLGRIQCVMKMVRIGLVVPQLQYRMYGSLINQMAQVAQNYDREFKQFKLFIIQNQILGSYLLQQNRAFADREVQMESFHSAVISQRRQELDDAIAKMDRLSLQMEEEDRAMEQARKEMEEGLKQFQNEQVARAVFAVLKSVAMIALAFVTAGATAPGAAASAAQAVNIAGQAAQALRRVVEILEGLEAVMEVVAAIKHLVDALDQVSQIVDAPPMPDMPSEAGWSIFVNEVEAVAEGMPTEVSEVPVWRAKCKNVAALGREMSITAVQMSELQYDIWVQGMMRDMARSQADRLAAIQPADLTNYLEMATQMDMRTTRMLLGLLNILRIQNAALMYEYLLTPTQLTAWPLRMDTVANLLITHESAALSGLAQLGPPSDFTSRHVVKGIPVSLLLDGGDWEFEIPVQGGMSSFPSSWTRVRIRHLEMHFVQEASGGGEIIHQPATQTGTIYILLQGSTVFHDRRREEVMTFQAAVPLNYHYAYRLDTGEATLTNEPSEQFANTFMQMTPFTHWRLRLSASAAENKGLAFPTATAPDSTTEIAITFHVTAIRQIDWRQEEE

SEQ ID NO: 541 - protein, 853 aa, synthetic construct
  REGION 1..853: note = PtIP-83 polypeptide variant
MDYSTLYRDLNQISMPLDRVEFSEVMVIHRMYLRLSDLNVGELPGAERVKRLYVLADVVELATFAHPQLLNTRMPGSVTVIILCRLLQFPTDGSFAAWLELPFMELHTLIEQYRSEIKAADDAKWGTYVHAEEVQLSPLFNGWPYLVVEAQRCIITAAMHNTFNRPGWVRSITQFTTDQSGRVDTTLLARTEFGHIDLPLETDSPTAFSVSHRQSTNLPVEYTGIPVEVVTDPNILMGMQTSVHIAELVKACYPSPELVSAVGVHVNWLNEVLLRVVQKESQLQGTEAYNECLALLGRIQCVMKMGPFVSVVPQLQYRMYGSLIRQMAQVAQNYDQDFRQLKLFIAQNQILGSYLLQQNKAFADREVQMESFHSAVISQRREELDNTFAKMDRLSGQMEAESSAMEQAKKEMDEGLRQFQNRQVANALFAVLSAVAQIGLAFLTAGATAPGAVASAGQAVSIAGQAAQGLRRVVEILEQLEAVMEVVAAVKDLVDSLEQVGQIVDAPVMPELPSEADWSIFVNEVEAVAEGMPTEVSEVPVWRAKCKNVAALGREMSITAVQMSELQYDIWVQGLLRDIAQSHADRLAAIQPANLTNYLEMAIQMDMRTTRMLLGLLNILRIQNAALRYEYLLMPTELTTWPLGMDTVGDLLIAQENAALIGLMQLGPSSDFTSRHVVKDIPVNLLLDGEDWEFEIPVQAGMSSFPSSWSRVRIRHLEMHFVKEASGIGGEIIHRPATQTGTIYILLQGSTVFHDRRREEVMTFQAAVPLNYHYAYRLDTGEATLTNEPSEQFANTFMQMTPFTHWRLRLSASAAENKGLAFPTATAPDSTTEIAITFHVTAIRQIDWRQEEE

SEQ ID NO: 542 - protein, 865 aa, synthetic construct
  REGION 1..865: note = PtIP-83 polypeptide variant
MDYSTLYRDLNQISMPLDRVEFSEVMVIHRMYLRLSDLNVGELPGAERVKRLYVLADVVELATFAHPQLLNTRMPGSVTVIILCRLLQWPTDGRQSDTELHLTFMKLHAIQREENRWEITAADGMNWGVYIHAEEVQVGVLTMSWSSVLRVSALRSVITSGFRAVSVFEVPGSVRSTLGATLRPDHALYSTTMQATPNASHISAFNLRIVSPSAYRVCPLQNDTDTYLGIPADVAAVLPVDVVTDPNILLGMQTTVHIAELVKACHPSPDVVSAVGEHLNWLNKLLLPLKESTQLQGSESYKECLALLGRVHAAMKMVRIGLVVPQLQYRMYGSLINQMAQVAQNYDREFKQFKLFIIQNQILGSYLLQQNRAFAERELQMESFHAAVISQRREELDNTFAKMDRLSLQMEEEDRAMEQARKEMEEGLKQFQNEQVARAVFAVLKSVAMIALAFVTAGATAPGAAASAAQAVNIAGQAAQALRRVVEILEGLEAVMEVVAAIKHLVDALDQVSQIVDAPPMPDMPSEADWSIFVNEIEAVAEGMPTEVSEVPAWKAKCKNVAALGREMSITAVQMSELQYDIWVQGMMRDMARSQADRLAAIQPADLTNYLEMATQMDMRTTRMLLGLLNILRIQNAALRYEYLLMPTELTTWPLGMDTVGDLLIAQENAALIGLMQLGPSSDFTSRHVVKDIPVNLLLDGEDWEFEIPVQAGMSSFPSSWSRVRIRHLEMHFVKEASGIGGEIIHQPTTQTGTVYILLQGSTIFHDRRRDQVLPFQAAAPLNYHYAYRLDTGDSTLTNEPSEQFANKFMQMTPFTRWRLRLSASAKENAGLAFPTATALDSTTQIVITFHVTAIRQIDWRHDEE

SEQ ID NO: 543 - protein, 866 aa, synthetic construct
  REGION 1..866: note = PtIP-83 polypeptide variant
MALVDYGKLFEDLNQISMGVLDRVEFSEVMVIHRMYVRLADLNVGQLEGAEKVKRLYVFADVVELPVVEWRWPPQIPGSVTVIILCRLLQWPTDGRQSDTELHLTFMKLHAIQREENRWEITAADGMNWGVYIHAEEVQVGVLTMSWSSVLRVSALRSVITSGFRAVSVFEVPGSVRSTLGATLRPDHALYSTTMQATPNASHISAFNLRIVSPSAYRVCPLQNDTDTYLGIPADVAAVLPVDVVTDPNILLGMQTTVHIAELVKACHPSPDVVSAVGEHLNWLNKLLLPLKESTQLQGSESYKECLALLGRVHAAMKMVRIGLVVPQLQYRMYGSLIRQMAQVAQNYDQDFRQLKLFIAQNQILGSYLLQQNKAFADREVQMESFHSAVISQRREELDDAIAKMDRLSLQMEEEDRAMEQARKEMEEGLKQFQNEQVARAVFAVLKSVAMIALAFVTAGATAPGAAASAAQAVNIAGQAAQALRRVVEILEGLEAVMEVVAAIKHLVDALDQVSQIVDAPPMPDMPSEADWSIFVNEIEAVAEGMPTEVSEVPAWKAKCKNVAALGREMSITAVQMSELQYDIWVQGMMRDMARSQADRLAAIQPADLTNYLEMAIQMDMRTTRMLLGLLNILRIQNAALRYEYLLMPTELTTWPLGMDTVGDLLIAQENAALIGLMQLGPPSDFTSRHVVKGIPVSLLLDGGDWEFEIPVQGGMSSFPSSWTRVRIRHLEMHFVQEASGGGEIIHQPTTQTGTVYILLQGSTIFHDRRRDQVLPFQAAAPLNYHYAYRLDTGDSTLTNEPSEQFANKFMQMTPFTRWRLRLSASAAENKGLAFPTATAPDSTTEIAITFHVTAIRQIDWRQEEE

SEQ ID NO: 544 - protein, 851 aa, synthetic construct; identical to SEQ ID NO: 522
  REGION 1..851: note = PtIP-83 polypeptide variant

SEQ ID NO: 545 - protein, 853 aa, synthetic construct; identical to SEQ ID NO: 532
  REGION 1..853: note = PtIP-83 polypeptide variant

SEQ ID NO: 546 - protein, 852 aa, synthetic construct
  REGION 1..852: note = PtIP-83 polypeptide variant
MDYSTLYRDLNQISMPLDRVEFSEVMVIHRMYLRLSDLNVGELPGAERVKRLYVLADVVELATFAHPQLLNTRMPGSVTVIILCRLLQFPTDGSFAAWLELPFMELHTLIEQYRSEIKAADDAKWGTYVHAEEVQLSPLFNGWPYLVVEAQRCIITAAMHNTFNRPGWVRSITQFTTDQSGRVDTTLLARTEFGHIDLPLETDSPTAFSVSHRQSTNLPVEYTGIPVEVVTDPNILMGMQTSVHIAELVKACYPSPELVSAVGVHVNWLNEVLLRVVQKESQLQGTEAYNECLALLGRIQCVMKMGPFVSVVPQLQYRMYGSLIRQMAQVAQNYDQDFRQLKLFIAQNQILGSYLLQQNKAFADREVQMESFHSAVISQRRQELDDAIAKMDRLSLQMEEEDRAMEQARKEMEEGLKQFQNEQVARAVFAVLKSVAMIALAFVTAGATAPGAVASAGQAVSIAGQAAQGLRRVVEILEQLEAVMEVVAAVKDLVDSLEQVGQIVDAPVMPELPSEADWSIFVNEVEAVAEGMPTEVSEVPVWRAKCKNVAALGREMCITAEQISQLQYDIWVQGLLRDIAQSHADRLAAIQPANLTNYLEMAIQMDMRTTRILIGLLNIMRIQNAALMYEYLLTPTQLTAWPLRMDTVANLLITHESAALSGLAQLGPPSDFTSRHVVKGIPVSLLLDGGDWEFEIPVQGGMSSFPSSWTRVRIRHLEMHFVQEASGGGEIIHQPATQTGTVYILLQGSTIFHDRRRDQVLPFQAAAPLNYHYAYRLDTGDSTLTNEPSEQFANKFMQMTPFTRWRLRLSASAKENAGLAFPTATALDSTTQIVITFHVTAIRQIDWRHDEE

SEQ ID NO: 547 - protein, 852 aa, synthetic construct
  REGION 1..852: note = PtIP-83 polypeptide variant
MDYSTLYRDLNQISMPLDRVEFSEVMVIHRMYVRLADLNVGQLPGAERVKRLYVLADVVELATFAHPQLLNTRMPGSVTVIILCRLLQFPTDGSFAAWLELPFMELHTLIEQYRSEIKAADDAKWGTYVHAEEVQLSPLFNGWPYLVVEAQRCIITAAMHNTFNRPGWVRSITQFTTDQSGRVDTTLLARTEFGHIDLPLETDSPTAFSVSHRQSTNLPVEYTGIPVEVVTDPNILMGMQTSVHIAELVKACHPSPDVVSAVGVHVNWLNEVLLRVVQKESQLQGTEAYNECLALLGRIQCVMKMGPFVSVVPQLQYRMYGSLINQMAQVAQNYDREFKQFKLFIIQNQILGSYLLQQNRAFAERELQMESFHAAVISQRREELDNTFAKMDRLSGQMEAESSAMEQAKKEMDEGLRQFQNRQVANALFAVLSAVAQIGLAFLTAGATAPGAAASAAQAVNIAGQAAQGLRRVVEILEQLEAVMEVVAAVKDLVDSLEQVGQIVDAPVMPELPSEADWSIFVNEVEAVAEGMPTEVSEVPVWKAKCKNVAALGREMSITAVQMSELQYDIWVQGMMRDIAQSHADRLAAIQPANLTNYLEMAIQMDMRTTRILIGLLNILRIQNAALRYEYLLMPTELTTWPLGMDTVANLLITHESAALSGLAQLGPPSDFTSRHVVKGIPVSLLLDGGDWEFEIPVQGGMSSFPSSWTRVRIRHLEMHFVQEASGGGEIIHQPATQTGTIYILLQGSTVFHDRRREEVMTFQAAVPLNYHYAYRLDTGDSTLTNEPSEQFANKFMQMTPFTRWRLRLSASAAENKGLAFPTATAPDSTTEIAITFHVTAIRQIDWRHDEE

SEQ ID NO: 548 - protein, 852 aa, synthetic construct
  REGION 1..852: note = PtIP-83 polypeptide variant
MDYSTLYRDLNQISMPLDRVEFSEVMVIHRMYLRLSDLNVGELPGAERVKRLYVFVDVVELATFAHPQLLNTRMPGSVTVIILCRLLQFPTDGSFAAWLELPFMELHTLIEQYRSEIKAADDAKWGTYVHAEEVQLSPLFNGWPYLVVEAQRCIITAAMHNTFNRPGWVRSITQFTTDQSGRVDTTLLARTEFGHIDLPLETDSPTAFSVSHRQSTNLPVEYTGIPVEVVTDPNILMGMQTSVHIAELVKACYPSPELVSAVGVHVNWLNEVLLRVVQKESQLQGTEAYNECLALLGRIQCVMKMGPFVSVVPQLQYRMYGSLINQMAQVAQNYDQDFRQLKLFIAQNQILGSYLLQQNKAFADREVQMESFHSAVISQRRQELDDAIAKMDRLSLQMEAESSAMEQAKKEMDEGLRQFQNRQVANALFAVLSAVAQIGLAFLTAGATAPGAVASAGQAVSIAGQAAQGLRRVVEILEQLEAVMEVVAAVKDLVDSLEQVGQIVDAPVMPELPSEADWSIFVNEVEAVAEGMPTEVSEVPVWRAKCKNVAALGREMSITAVQMSELQYDIWVQGMMRDMARSQADRLAAIQPADLTNYLEMATQMDMRTTRILIGLLNIMRIQNAALMYEYLLTPTQLTAWPLRMDTVANLLITHESAALSGLAQLGPPSDFTSRHVVKDIPVNLLLDGEDWEFEIPVQAGMSSFPSSWSRVRIRHLEMHFVKEASGGGEIIHQPATQTGTIYILLQGSTVFHDRRREEVMTFQAAVPLNYHYAYRLDTGEATLTNEPSEQFANTFMQMTPFTHWRLRLSASAAENKGLAFPTATALDSTTQIVITFHVTAIRQIDWRHEEE

SEQ ID NO: 549 - protein, 855 aa, synthetic construct
  REGION 1..855: note = PtIP-83 polypeptide variant
MALVDYGKLFEDLNQISMPLDRVEFSEVMVIHRMYLRLSDLNVGELPGAERVKRLYVFADVVELATFAHPQLLNTRMPGSVTVIILCRLLQFPTDGSFAAWLELPFMELHTLIEQYRSEIKAADDAKWGTYVHAEEVQLSPLFNGWPYLVVEAQRCIITAAMHNTFNRPGWVRSITQFTTDQSGRVDTTLLARTEFGHIDLPLETDSPTAFSVSHRQSTNLPVEYTGIPVEVVTDPNILMGMQTSVHIAELVKACYPSPELVSAVGVHVNWLNEVLLRVVQKESQLQGTEAYNECLALLGRIQCVMKMGPFVSVVPQLQYRMYGSLINQMAQVAQNYDREFKQFKLFIIQNQILGSYLLQQNRAFAERELQMESFHAAVISQRREELDNTFAKMDRLSGQMEAESSAMEQAKKEMDEGLRQFQNRQVANALFAVLSAVAQIGLAFLTAGATAPGAAASAAQAVNIAGQAAQALRRVVEILEGLEAVMEVVAAIKHLVDALDQVSQIVDAPPMPDMPSEADWSIFVNEIEAVAEGMPTEVSEVPAWKAKCKNVAALGREMCITAEQISQLQYDIWVQGLLRDIAQSHADRLAAIQPANLTNYLEMAIQMDMRTTRILIGLLNIMRIQNAALMYEYLLTPTQLTAWPLRMDTVANLLITHESAALSGLAQLGPPSDFTSRHVVKGIPVSLLLDGGDWEFEIPVQGGMSSFPSSWTRVRIRHLEMHFVQEASGGGEIIHQPATQTGTIYILLQGSTVFHDRRREEVMTFQAAVPLNYHYAYRLDTGEATLTNEPSEQFANKFMQMTPFTRWRLRLSASAKENAGLAFPTATALDSTTQIVITFHVTAIRQIDWRHDEE

SEQ ID NO: 550 - protein, 852 aa, synthetic construct
  REGION 1..852: note = PtIP-83 polypeptide variant
MDYSTLYRDLNQISMPLDRVEFSEVMVIHRMYLRLSDLNVGELPGAERVKRLYVLADVVELATFAHPQLLNTRMPGSVTVIILCRLLQFPTDGSFAAWLELPFMELHTLIEQYRSEIKAADDAKWGTYVHAEEVQLSPLFNGWPYLVVEAQRCIITAAMHNTFNRPGWVRSITQFTTDQSGRVDTTLLARTEFGHIDLPLETDSPTAFSVSHRQSTNLPVEYTGIPVEVVTDPNILMGMQTSVHIAELVKACHPSPELVSAVGVHVNWLNEVLLRVVQKESQLQGTEAYNECLALLGRIQCVMKMGPFVSVVPQLQYRMYGSLIRQMAQVAQNYDQDFRQLKLFIAQNQILGSYLLQQNKAFADREVQMESFHAAVISQRREELDDAIAKMDRLSLQMEEEDRAMEQARKEMEEGLKQFQNEQVARAVFAVLSAVAQIGLAFLTAGATAPGAAASAAQAVNIAGQAAQALRRVVEILEGLEAVMEVVAAIKHLVDALDQVSQIVDAPPMPDMPSEADWSIFVNEIEAVAEGMPTEVSEVPAWKAKCKNVAALGREMCITAEQISQLQYDIWVQGLLRDIAQSHADRLAAIQPANLTNYLEMAIQMDMRTTRILIGLLNIMRIQNAALMYEYLLTPTQLTAWPLRMDTVANLLITHESAALSGLAQLGPPSDFTSRHVVKGIPVSLLLDGGDWEFEIPVQGGMSSFPSSWTRVRIRHLEMHFVQEASGGGEIIHQPATQTGTIYILLQGSTVFHDRRREEVMTFQAAVPLNYHYAYRLDTGEATLTNEPSEQFANTFMQMTPFTHWRLRLSASAKENAGLAFPTATALDSTTQIVITFHVTAIRQIDWRHDEE

SEQ ID NO: 551 - protein, 852 aa, synthetic construct
  REGION 1..852: note = PtIP-83 polypeptide variant
MDYSTLYRDLNQISMPLDRVEFSEVMVIHRMYLRLSDLNVGELPGAERVKRLYVLADVVELAAFAHPQLLNTRMPGSVTVIILCRLLQFPTDGSFAAWLELPFMELHTLIEQYRSEIKAADDAKWGTYVHAEEVQLSPLFNGWPYLVVEAQRCIITAAMHNTFNRPGWVRSITQFTTDQSGRVDTTLLARTEFGHIDLPLETDSPTAFSVSHRQSTNLPVEYTGIPVEVVTDPNILMGMQTSVHIAELVKACYPSPELVSAVGVHVNWLNEVLLRVVQKESQLQGTEAYNECLALLGRIQCVMKMGPFVSVVPQLQYRMYGSLIRQMAQVAQNYDQDFRQLKLFIAQNQILGSYLLQQNKAFADREVQMESFHSAVISQRRQELDNTFAKMDRLSGQMEAESSAMEQAKKEMDEGLRQFQNRQVANALFAVLSAVAQIGLAFLTAGATAPGAVASAGQAVSIAGQAAQGLRRVVEILEQLEAVMEVVAAVKDLVDSLEQVGQIVDAPVMPELPSEADWSIFVNEVEAVAEGMPTEVSEVPVWRAKCKNVAALGREMSITAVQMSELQYDIWVQGLLRDIAQSHADRLAAIQPANLTNYLEMAIQMDMRTTRMLLGLLNIMRIQNAALMYEYLLMPTELTTWPLGMDTVGDLLIAQENAALIGLMQLGPSSDFTSRHVVKDIPVNLLLDGEDWEFEIPVQGGMSSFPSSWTRVRIRHLEMHFVQEASGGGEIIHQPTTQTGTVYILLQGSTVFHDRRREEVMTFQAAVPLNYHYAYRLDTGEATLTNEPSEQFANTFMQMTPFTHWRLRLSASAAENKGLAFPTATALDSTTQIVITFHVTAIRQIDWRQEEE

SEQ ID NO: 552 - protein, 853 aa, synthetic construct
  REGION 1..853: note = PtIP-83 polypeptide variant
MDYSTLYRDLNQISMPLDRVEFSEVMVIHRMYLRLSDLNVGELPGAERVKRLYVLADVVELATFAHPQLLNTRMPGSVTVIILCRLLQFPTDGSFAAWLELPFMELHTLIEQYRSEIKAADDAKWGTYVHAEEVQLSPLFNGWPYLVVEAQRCIITAAMHNTFNRPGWVRSITQFTTDQSGRVDTTLLARTEFGHIDLPLETDSPTAFSVSHRQSTNLPVEYTGIPVEVVTDPNILMGMQTSVHIAELVKACYPSPDVVSAVGEHLNWLNEVLLRVVQKESTQLQGSESYKECLALLGRVHAAMKMVRIGLVVPQLQYRMYGSLINQMAQVAQNYDREFKQFKLFIIQNQILGSYLLQQNRAFAERELQMESFHAAVISQRRQELDDAIAKMDRLSGQMEAESSAMEQAKKEMDEGLRQFQNRQVANALFAVLSAVAQIGLAFLTAGATAPGAVASAGQAVSIAGQAAQGLRRVVEILEQLEAVMEVVAAVKDLVDSLEQVGQIVDAPVMPELPSEADWSIFVNEVEAVAEGMPTEVSEVPAWKAKCKNVAALGREMCITAEQISQLQYDIWVQGLLRDIAQSHADRLAAIQPANLTNYLEMAIQMDMRTTRILIGLLNIMRIQNAALMYEYLLTPTELTTWPLGMDTVGDLLIAQENAALIGLMQLGPSSDFTSRHVVKGIPVSLLLDGGDWEFEIPVQGGMSSFPSSWTRVRIRHLEMHFVQEASGGGEIIHQPATQTGTIYILLQGSTVFHDRRREEVMTFQAAVPLNYHYAYRLDTGEATLTNEPSEQFANTFMQMTPFTHWRLRLSASAKENAGLAFPTATALDSTTQIVITFHVTAIRQIDWRQEEE

SEQ ID NO: 553 - protein, 854 aa, synthetic construct
  REGION 1..854: note = PtIP-83 polypeptide variant
MDYSTLYRDLNQISMGVLDRVEFSEVMVIHRMYLRLSDLNVGELPGAERVKRLYVLADVVELATFAHPQLLNTRMPGSVTVIILCRLLQFPTDGSFAAWLELPFMKLHTLIEQYRSEIKAADDAKWGTYVHAEEVQLSPLFNGWPYLVVEAQRCIITAAMHNTFNRPGWVRSITQFTTDQSGRVDTTLLARTEFGHIDLPLETDSPTAFSVSHRQSTNLPVEYTGIPVEVVTDPNILMGMQTSVHIAELVKACYPSPELVSAVGVHVNWLNEVLLRVVQKESQLQGTEAYNECLALLGRIQCVMKMGPFVSVVPQLQYRMYGSLIRQMAQVAQNYDQDFRQLKLFIAQNQILGSYLLQQNKAFADREVQMESFHSAVISQRRQELDDAIAKMDRLSLQMEEEDRAMEQARKEMEEGLKQFQNEQVARAVFAVLKSVAMIALAFVTAGATAPGAVASAGQAVSIAGQAAQGLRRVVEILEGLEAVMEVVAAIKHLVDALDQVSQIVDAPPMPDMPSEADWSIFVNEIEAVAEGMPTEVSEVPVWRAKCKNVAALGREMSITAVQMSELQYDIWVQGMMRDMARSQADRLAAIQPADLTNYLEMATQMDMRTTRMLLGLLNILRIQNAALRYEYLLMPTELTTWPLRMDTVANLLITHESAALSGLAQLGPSSDFTSRHVVKDIPVNLLLDGEDWEFEIPVQAGMSSFPSSWSRVRIRHLEMHFVKEASGIGGEIIHQPTTQTGTVYILLQGSTVFHDRRREEVMTFQAAVPLNYHYAYRLDTGEATLTNEPSEQFANTFMQMTPFTRWRLRLSASAKENAGLAFPTATALDSTTQIVITFHVTAIRQIDWRHDEE

SEQ ID NO: 554 - protein, 852 aa, synthetic construct
  REGION 1..852: note = PtIP-83 polypeptide variant
MDYSTLYRDLNQISMPLDRVEFSEVMVIHRMYLRLSDLNVGELPGAERVKRLYVLADVVELATFAHPQLLNTRMPGSVTVIILCRLLQFPTDGSFAAWLELPFMELHTLIEQYRSEIKAADDAKWGTYVHAEEVQLSPLFNGWPYLVVEAQRCIITAAMHNTFNRPGWVRSITQFTTDQSGRVDTTLLARTEFGHIDLPLETDSPTAFSVSHRQSTNLPVEYTGIPVEVVTDPNILLGMQTTVHIAELVKACHPSPDVVSAVGVHLNWLNKLLLPLKESTQLQGSEAYNECLALLGRIQCVMKMGPFVSVVPQLQYRMYGSLIRQMAQVAQNYDQDFRQLKLFIAQNQILGSYLLQQNKAFADREVQMESFHSAVISQRRQELDDAIAKMDRLSLQMEEEDRAMEQARKEMEEGLKQFQNEQVARAVFAVLKSVAMIALAFVTAGATAPGAAASAAQAVSIAGQAAQGLRRVVEILEQLEAVMEVVAAVKDLVDSLEQVGQIVDAPVMPELPSEADWSIFVNEVEAVAEGMPTEVSEVPAWKAKCKNVAALGREMCITAEQISQLQYDIWVQGLLRDIAQSHADRLAAIQPANLTNYLEMAIQMDMRTTRILIGLLNIMRIQNAALMYEYLLTPTQLTTWPLGMDTVGDLLIVQENAALIGLMQLGPPSDFTSRHVVKGIPVSLLLDGGDWEFEIPVQGGMSSFPSSWTRVRIRHLEMHFVQEASGIGGEIIHQPTTQTGTVYILLQGSTVFHDRRRDQVLPFQAAAPLNYHYAYRLDTGDSTLTNEPSEQFANKFMQMTPFTRWRLRLSASAKENAGLAFPTATALDSTTQIVITFHVTAIRQIDWRHDEE

SEQ ID NO: 555 - protein, 852 aa, synthetic construct
  REGION 1..852: note = PtIP-83 polypeptide variant
MDYSTLYRDLNQISMPLDRVEFSEVMVIHRMYLRLSDLNVGELPGAERVKRLYVLADVVELATFAHPQLLNTRMPGSVTVIILCRLLQFPTDGSFAAWLELPFMELHTLIEQYRSEIKAADDAKWGTYVHAEEVQLSPLFNGWPYLVVEAQRCIITAAMHNTFNRPGWVRSITQFTTDQSGRVDTTLLARTEFGHIDLPLETDSPTAFSVSHRQSTNLPVEYTGIPVEVVTDPNILMGMQTSVHIAELVKACYPSPELVSAVGVHVNWLNEVLLRVVQKESQLQGTEAYNECLALLGRIQCVMKMGPFVSVVPQLQYRMYGSLINQMAQVAQNYDREFKQFKLFIIQNQILGSYLLQQNRAFADREVQMESFHSAVISQRREELDDAIAKMDRLSLQMEAESSAMEQAKKEMEEGLKQFQNEQVARAVFAVLKSVAMIALAFVTAGATAPGAAASAAQAVSIAGQAAQALRRVVEILEGLEAVMEVVAAVKDLVDALDQVSQIVDAPPMPDMPSEADWSIFVNEIEAVAEGMPTEVSEVPAWKAKCKNVAALGREMCITAEQISQLQYDIWVQGLLRDIARSQADRLAAIQPADLTNYLEMATQMDMRTTRMLLGLLNILRIQNAALRYEYLLMPTELTTWPLGMDTVGDLLIAQENAALIGLMQLGPSSDFTSRHVVKDIPVNLLLDGEDWEFEIPVQAGMSSFPSSWSRVRIRHLEMHFVQEASGGGEIIHQPATQTGTIYILLQGSTVFHDRRREEVMTFQAAVPLNYHYAYRLDTGEATLTNEPSEQFANTFMQMTPFTHWRLRLSASAAENKGLAFPTATAPDSTTEIAITFHVTAIRQIDWRQEEE

SEQ ID NO: 556 - protein, 853 aa, synthetic construct
  REGION 1..853: note = PtIP-83 polypeptide variant
MDYSTLYRDLNQISMPLDRVEFSEVMVIHRMYLRLSDLNVGELPGAERVKRLYVLADVVELATFAHPQLLNTRMPGSVTVIILCRLLQFPTDGSFAAWLELPFMELHTLIEQYRSEIKAADDAKWGTYVHAEEVQLSPLFNGWPYLVVEAQRCIITAAMHNTFNRPGWVRSITQFTTDQSGRVDTTLLARTEFGHIDLPLETDSPTAFSVSHRQSTNLPVEYTGIPVEVVTDPNILMGMQTSVHIAELVKACYPSPELVSAVGVHVNWLNEVLLRVVQKESQLQGTEAYNECLALLGRIQCVMKMGPFVSVVPQLQYRMYGSLIRQMAQVAQNYDQDFRQLKLFIAQNQILGSYLLQQNKAFADREVQMESFHSAVISQRRQELDDAIAKMDRLSLQMEEEDRAMEQARKEMEEGLKQFQNEQVARAVFAVLKSVAMIALAFVTAGATAPGAAASAAQAVNIAGQAAQALRRVVEILEGLEAVMEVVAAVKDLVDSLEQVGQIVDAPVMPELPSEADWSIFVNEIEAVAEGMPTEVSEVPAWKAKCKNVAALGREMCITAEQISQLQYDIWVQGLLRDIAQSHADRLAAIQPADLTNYLEMATQMDMRTTRILIGLLNIMRIQNAALMYEYLLTPTQLTAWPLRMDTVANLLITHESAALSGLAQLGPPSDFTSRHVVKGIPVSLLLDGGDWEFEIPVQGGMSSFPSSWSRVRIRHLEMHFVKEASGIGGEIIHQPTTQTGTVYILLQGSTIFHDRRRDQVLPFQAAAPLNYHYAYRLDTGEATLTNEPSEQFANTFMQMTPFTHWRLRLSASAAENKGLAFPTATAPDSTTEIAITFHVTAIRQIDWRQEEE

SEQ ID NO: 557 - protein, 853 aa, synthetic construct; identical to SEQ ID NO: 552
  REGION 1..853: note = PtIP-83 polypeptide variant

SEQ ID NO: 558 - protein, 852 aa, synthetic construct
  REGION 1..852: note = PtIP-83 polypeptide variant
MDYSTLYRDLNQISMPLDRVEFSEVMVIHRMYLRLSDLNVGELPGAERVKRLYVLADVVELATFAHPQLLNTRMPGSVTVIILCRLLQFPTDGSFAAWLELPFMELHTLIEQYRSEIKAADDAKWGTYVHAEEVQLSPLFNGWPYLVVEAQRCIITAAMHNTFNRPGWVRSITQFTTDQSGRVDTTLLARTEFGHIDLPLETDSPTAFSVSHRQSTNLPVEYTGIPVEVVTDPNILMGMQTSVHIAELVKACYPSPELVSAVGVHVNWLNEVLLRVVQKESQLQGTEAYNECLALLGRIQCVMKMGPFVSVVPQLQYRMYGSLIRQMAQVAQNYDQDFRQLKLFIAQNQILGSYLLQQNRAFADREVQMESFHSAVISQRRQELDNTFAKMDRLSGQMEAESSAMEQAKKEMDEGLRQFQNRQVANALFAVLSAVAQIGLAFLTAGATAPGAVASAGQAVSIAGQAAQGLRRVVEILEGLEAVMEVVAAVKDLVDSLEQVGQIVDAPVMPELPSEADWSIFVNEVEAVAEGMPTEVSEVPAWKAKCKNVAALGREMCITAEQISQLQYDIWVQGLLRDIAQSHADRLAAIQPANLTNYLEMAIQMDMRTTRILIGLLNIMRIQNAALMYEYLLTPTQLTAWPLRMDTVGDLLITQENAALIGLMQLGPPSDFTSRHVVKGIPVSLLLDGGDWEFEIPVQGGMSSFPSSWTRVRIRHLEMHFVQEASGGGEIIHQPATQTGTIYILLQGSTVFHDRRREEVMTFQAAVPLNYHYAYRLDTGDSTLTNEPSEQFANKFMQMTPFTRWRLRLSASAKENAGLAFPTATALDSTTQIVITFHVTAIRQVDWRHDEE

SEQ ID NO: 559 - protein, 852 aa, synthetic construct
  REGION 1..852: note = PtIP-83 polypeptide variant
MDYSTLYRDLNQISMPLDRVEFSEVMVIHRMYLRLSDLNVGQLEGAERVKRLYVFADVVELATFAHPQLLNTRMPGSVTVIILCRLLQFPTDGSFAAWLELPFMELHTLIEQYRSEIKAADDAKWGTYVHAEEVQLSPLFNGWPYLVVEAQRCIITAAMHNTFNRPGWVRSITQFTTDQSGRVDTTLLARTEFGHIDLPLETDSPTAFSVSHRQSTNLPVEYTGIPVEVVTDPNILMGMQTSVHIAELVKACYPSPELVSAVGVHVNWLNEVLLRVVQKESQLQGTEAYNECLALLGRIQCVMKMGPFVSVVPQLQYRMYGSLIRQMAQVAQNYDQDFRQLKLFIAQNQILGSYLLQQNKAFADREVQMESFHSAVISQRREELDNTFAKMDRLSLQMEAESSAMEQAKKEMDEGLRQFQNRQVANALFAVLKSVAMIALAFVTAGATAPGAVASAGQAVSIAGQAAQGLRRVVEILEQLEAVMEVVAAVKDLVDSLEQVGQIVDAPVMPELPSEADWSIFVNEVEAVAEGMPTEVSEVPVWRAKCKNVAALGREMSITAVQISQLQYDICVQGMMRDMARSQADRLAAIQPADLTNYLEMATQMDMRTTRILIGLLNIMRIQNAALMYEYLLTPTQLTAWPLRMDTVANLLITHESAALSGLAQLGPPSDFTSRHVVKGIPVSLLLDGGDWEFEIPVQGGMSSFPSSWTRVRIRHLEMHFVQEASGGGEIIHQPATQTGTVYILLQGSTVFHDRRREEVMTFQAAVPLNYHYAYRLDTGDSTLTNEPSEQFANKFMQMTPFTRWRLRLSASAKENAGLAFPTATALDSTTQIVITFHVTAIRQIDWRHDEE

SEQ ID NO: 560 - protein, 853 aa, synthetic construct
  REGION 1..853: note = PtIP-83 polypeptide variant
MDYSTLYRDLNQISMPLDRVEFSEVMVIHRMYLRLSDLNVGELPGAERVKRLYVLADVVELATFAHPQLLNTRMPGSVTVIILCRLLQFPTDGSFAAWLELPFMELHTLIEQYRSEIKAADDAKWGTYVHAEEVQLSPLFNGWPYLVVEAQRCIITAAMHNTFNRPGWVRSITQFTTDQSGRVDTTLLARTEFGHIDLPLETDSPTAFSVSHRQSTNLPVEYTGIPVEVVTDPNILMGMQTSVHIAELVKACYPSPELVSAVGVHVNWLNEVLLRVVQKESQLQGTEAYNECLALLGRIQCVMKMGPFVSVVPQLQYRMYGSLIRQMAQVAQNYDQDFRQLKLFIAQNQILGSYLLQQNKAFADREVQMESFHSAVISQRRQELDDAIAKMDRLSLQMEEEDRAMEQAKKEMDEGLKQFQNEQVARAVFAVLKSVAMIALAFVTAGATAPGAVASAGQAVSIAGQAAQGLRRVVEILEGLEAVMEVVAAIKHLVDALDQVSQIVDAPPMPDMPSEADWSIFVNEVEAVAEGMPTEVSEVPVWRAKCKNVAALGREMSITAVQMSELQYDIWVQGMMRDMARSQTDRLAAIQPADLTNYLEMATQMDMRTTRMLLGLLNILRIQNAALRYEYLLMPTELTTWPLGMDTVGDLLIAQENAALIGLMQLGPSSDFTSRHVVKDIPVNLLLDGEDWEFEIPVQAGMSSFPSSWSRVRIRHLEMHFVKEASGIGGEIIHQPTTQTGTVYILLQGSTIFHDRRRDQVLPFQAAAPLNYHYAYRLDTGDSTLTNEPSEQFANKFMQMTPFTRWRLRLSASAKENAGLAFPTATALDSTTQIVITFHVTAIRQIDWRHDEE

SEQ ID NO: 561 - protein, 853 aa, synthetic construct
  REGION 1..853: note = PtIP-83 polypeptide variant
MDYSTLYRDLNQISMPLDRVEFSEVMVIHRMYLRLSDLNVGELPGAERVKRLYVLADVVELATFAHPQLLNTRMPGSVTVIILCRLLQFPTDGSFAAWLELPFMELHTLIEQYRSEIKAADDAKWGTYVHAEEVQLSPLFNGWPYLVVEAQRCIITAAMHNTFNRPGWVRSITQFTTDQSGRVDTTLLARTEFGHIDLPLETDSPTAFSVSHRQSTNLPVEYTGIPVEVVTDPNILMGMQTSVHIAELVKACYPSPELVSAVGVHVNWLNEVLLRVVQKESQLQGTEAYNECLALLGRIQCVMKMGPFVSVVPQLQYRMYGSLIRQMAQVAQNYDQEFKQFKLFIIQNQILGSYLLQQNRAFAERELQMESFHAAVISQRREELDNTFAKMDRLSGQMEAESSAMEQAKKEMDEGLRQFQNRQVANALFAVLSAVAQIGLAFVTAGATAPGAVASAGQAVSIAGQAAQGLRRVVEILEQLEAVMEVVAAIKHLVDALDQVSQIVDAPPMPDMPSEADWSIFVNEIEAVAEGMPTEVSEVPVWKAKCKNVAALGREMCITAVQMSELQYDIWVQGLLRDIAQSHADRLAAIQPANLTNYLEMAIQMDMRTTRILIGLLNIMRIQNAALMYEYLLTPTQLTAWPLRMDTVANLLITHESAALSGLAQLGPSSDFTSRHVVKDIPVNLLLDGEDWEFEIPVQAGMSSFPSSWSRVRIRHLEMHFVKEASGIGGEIIHQPTTQTGTVYILLQGSTIFHDRRRDQVLPFQAAAPLNYHYAYRLDTGEATLTNEPSEQFANTFMQMTPFTHWRLRLSASAAENKGLAFPTATALDSTTQIVITFHVTAIRQIDWRQEEE

SEQ ID NO: 562 - protein, 852 aa, synthetic construct
  REGION 1..852: note = PtIP-83 polypeptide variant
MDYSTLYRDLNQISMPLDRVEFSEVMVIHRMYLRLSDLNVGQLEGAEKVKRLYVLADVVELATFAHPQLLNTRMPGSVTVIILCRLLQFPTDGSFAAWLELPFMELHTLIEQYRSEIKAADDAKWGTYVHAEEVQLSPLFNGWPYLVVEAQRCIITAAMHNTFNRPGWVRSITQFTTDQSGRVDTTLLARTEFGHIDLPLETDSPTAFSVSHRQSTNLPVEYTGIPVEVVTDPNILMGMQTSVHIAELVKACYPSPELVSAVGVHVNWLNEVLLRVVQKESQLQGTEAYNECLALLGRIQCVMKMGPFVSVVPQLQYRMYGSLIRQMAQVAQNYDQDFRQLKLFIAQNQILGSYLLQQNKAFADREVQMESFHSAVISQRREELDDAIAKMDRLSLQMEEEDRAMEQARKEMEEGLKQFQNEQVARAVFAVLKSVAMIALAFVTAGATAPGAAASAAQAVNIAGQAAQALRRVVEILEQLEAVMEVVAAVKDLVDSLEQVGQIVDAPVMPELPSEADWSIFVNEVEAVAEGMPTEVSEVPAWKAKCKNVAALGREMSITAEQISQLQYDIWVQGLLRDMARSQADRLAAIQPADLTNYLEMATQMDMRTTRMLLGLLNILRIQNAALRYEYLLMPTELTTWPLGMDTVGDLLIAQENAALIGLMQLGPSSDFTSRHVVKDIPVSLLLDGGDWEFEIPVQGGMSSFPSSWTRVRIRHLEMHFVQEASGGGEIIHQPATQTGTIYILLQGSTVFHDRRREEVMTFQAAVPLNYHYAYRLDTGEATLTNEPSEQFANKFMQMTPFTRWRLRLSASAAENKGLAFPTATAPDSTTEIAITFHVTAIRQIDWRQEEE

SEQ ID NO: 563 - protein, 867 aa, synthetic construct
  REGION 1..867: note = PtIP-83 polypeptide variant
MALVDYGKLFEDLNQISMGVLDRVEFSEVMVIHRMYVRLADLNVGQLEGAEKVKRLYVFADVVELPVVEWRWPPQIPGSVTVIILCRLLQWPTDGRQSDTELHLTFMKLHAIQREENRWEITAADGMNWGVYIHAEEVQVGVLTMSWSSVLRVSALRSVITSGFRAVSVFEVPGSVRSTLGATLRPDHALYSTTMQATPNASHISAFNLRIVSPSAYRVCPLQNDTDTYLGIPADVAAVLPVDVVTDPNILLGMQTTVHIAELVKACHPSPDVVSAVGEHLNWLNKLLLPLKESTQLQGSESYKECLALLGRVHAAMKMVRIGLVVPQLQYRMYGSLINQMAQVAQNYDREFKQFKLFIIQNQILGSYLLQQNRAFAERELQMESFHAAVISQRRQELDDAIAKMDRLSGQMEAESSAMEQAKKEMDEGLRQFQNRQVANALFAVLSAVAQIGLAFLTAGATAPGAVASAGQAVSIAGQAAQGLRRVVEILEGLEAVMEVVAAVKDLVDSLEQVGQIVDAPVMPELPSEADWSIFVNEVEAVAEGMPTEVSEVPVWRAKCKNVAALGREMSITAVQISQLQYDIWVQGMMRDMARSQADRLAAIQPADLTNYLEMATQMDMRTTRMLLGLLNILRIQNAALRYEYLLMPTELTTWPLGMDTVGDLLIAQENAALIGLMQLGPSSDFTSRHVVKGIPVSLLLDGGDWEFEIPVQAGMSSFPSSWSRVRIRHLEMHFVQEASGIGGEIIHQPATQTGTVYILLQGSTIFHDRRRDQVLPFQAAAPLNYHYAYRLDTGDSTLTNEPSEQFANKFMQMTPFTRWRLRLSASAKENAGLAFPTATALDSTTQIVITFHVTAIRQIDWRHDEE

SEQ ID NO: 564 - protein, 867 aa, synthetic construct
  REGION 1..867: note = PtIP-83 polypeptide variant
MALVDYGKLFEDLNQISMGVLDRVEFSEVMVIHRMYVRLADLNVGQLEGAEKVKRLYVFADVVELPVVEWRWPPQIPGSVTVIILCRLLQWPTDGRQSDTELHLTFMKLHAIQREENRWEITAADGMNWGVYIHAEEVQVGVLTMSWSSVLRVSALRSVITSGFRAVSVFEVPGSVRSTLGATLRPDHALYSTTMQATPNASHISAFNLRIVSPSAYRVCPLQNDTDTYLGIPADVAAVLPVDVVTDPNILLGMQTTVHIAELVKACHPSPDVVSAVGEHLNWLNKLLLPLKESTQLQGSESYKECLALLGRVHAAMKMVRIGLVVPQLQYRMYGSLINQMAQVAQNYDREFKQFKLFIIQNQILGSYLLQQNRAFAERELQMESFHAAVISQRREELDNTFAKMDRLSLQMEEEDRAMEQAKKEMDEGLRQFQNRQVANALFAVLSAVAQIGLAFLTAGATAPGAVASAGQAVSIAGQAAQGLRRVVEILEGLEAVMEVVAAIKHLVDSLEQVGQIVDAPVMPELPSEADWSIFVNEVEAVAEGMPTEVSEVPVWKAKCKNVAALGREMSITAVQMSELQYDIWVQGMMRDMARSQADRLAAIQPADLTNYLEMATQMDMRTTRMLLGLLNILRIQNAALRYEYLLMPTELTTWPLGMDTVGDLLIAQENAALIGLMQLGPSSDFTSRHVVKDIPVNLLLDGEDWEFEIPVQGGMSSFPSSWTRVRIRHLEMHFVKEASGIGGEIIHQPATQTGTVYILLQGSTIFHDRRREEVLPFQAAAPLNYHYAYRLDTGEATLTNEPSEQFANTFMQMTPFTRWRLRLSASAAENKGLAFPTATAPDSTTEIAITFHVTAIRQIDWRQEEE

SEQ ID NO: 565 - protein, 866 aa, synthetic construct
  REGION 1..866: note = PtIP-83 polypeptide variant
MALVDYGKLFEDLNQISMGVLDRVEFSEVMVIHRMYVRLADLNVGQLEGAEKVKRLYVFADVVELPVVEWRWPPQIPGSVTVIILCRLLQWPTDGRQSDTELHLTFMKLHAIQREENRWEITAADGMNWGVYIHAEEVQVGVLTMSWSSVLRVSALRSVITSGFRAVSVFEVPGSVRSTLGATLRPDHALYSTTMQATPNASHISAFNLRIVSPSAYRVCPLQNDTDTYLGIPADVAAVLPVDVVTDPNILLGMQTTVHIAELVKACHPSPDVVSAVGEHLNWLNKLLLPLKESTQLQGSESYKECLALLGRVHAAMKMVRIGLVVPQLQYRMYGSLINQMAQVAQNYDREFKQFKLFIIQNQILGSYLLQQNRAFAERELQMESFHSAVISQRREELDNTFAKMDRLSLQMEEEDRAMEQAKKEMDEGLRQFQNRQVANALFAVLSAVAQIGLAFLTAGATAPGAVASAGQAVSIAGQAAQGLRRVVEILEQLEAVMEVVAAVKDLVDSLEQVGQIVDAPVMPELPSEADWSIFVNEVEAVAEGMPTEVSEVPAWKAKCKNVAALGREMCITAEQISQLQYDIWVQGMMRDMARSQADRLAAIQPADLTNYLEMATQMDMRTTRMLLGLLNILRIQNAALRYEYLLMPTELTTWPLGMDTVGDLLIAHESAALSGLAQLGPPSDFTSRHVVKGIPVSLLLDGGDWEFEIPVQGGMSSFPSSWTRVRIRHLEMHFVQEASGGGEIIHQPATQTGTIYILLQGSTVFHDRRREEVMTFQAAVPLNYHYAYRLDTGEATLTNEPSEQFANTFMQMTPFTHWRLRLSASAAENKGLAFPTATAPDSTTEIAITFHVTAIRQIDWRHDEE

SEQ ID NO: 566 - protein, 867 aa, synthetic construct
  REGION 1..867: note = PtIP-83 polypeptide variant
MALVDYGKLFEDLNQISMGVLDRVEFSEVMVIHRMYVRLADLNVGQLEGAEKVKRLYVFADVVELPVVEWRWPPQIPGSVTVIILCRLLQWPTDGRQSDTELHLTFMKLHAIQREENRWEITAADGMNWGVYIHAEEVQVGVLTMSWSSVLRVSALRSVITSGFRAVSVFEVPGSVRSTLGATLRPDHALYSTTMQATPNASHISAFNLRIVSPSAYRVCPLQNDTDTYLGIPADVAAVLPVDVVTDPNILLGMQTTVHIAELVKACHPSPDVVSAVGEHLNWLNKLLLPLKESTQLQGSESYKECLALLGRVHAAMKMVRIGLVVPQLQYRMYGSLINQMAQVAQNYDREFKQFKLFIIQNQILGSYLLQQNRAFAERELQMESFHSAVISQRRQELDDAIAKMDRLSGQMEAESSAMEQAKKEMDEGLRQFQNRQVANALFAVLSAVAMIALAFVTAGATAPGAVASAGQAVSIAGQAAQGLRRVVEILEGLEAVMEVVAAVKDLVDSLEQVGQIVDAPVMPELPSEADWSIFVNEVEAVAEGMPTEVSEVPVWKAKCKNVAALGREMSITAVQMSELQYDIWVQGMMRDMARSHADRLAAIQPANLTNYLEMAIQMDMRTTRMLLGLLNILRIQNAALRYEYLLTPTELTTWPLGMDTVGDLLIAQENAALIGLMQLGPPSDFTSRHVVKGIPVSLLLDGGDWEFEIPVQGGMSSFPSSWSRVRIRHLEMHFVKEASGIGGEIIHQPTTQTGTVYILLQGSTVFHDRRREEVMTFQAAVPLNYHYAYRLDTGDSTLTNEPSEQFANKFMQMTPFTRWRLRLSASAKENAGLAFPTATAPDSTTEIVITFHVTAIRQIDWRHDEE

SEQ ID NO: 567 - protein, 866 aa, synthetic construct
  REGION 1..866: note = PtIP-83 polypeptide variant
MALVDYGKLFEDLNQISMGVLDRVEFSEVMVIHRMYVRLADLNVGQLEGAEKVKRLYVFADVVELPVVEWRWPPQIPGSVTVIILCRLLQWPTDGRQSDTELHLTFMKLHAIQREENRWEITAADGMNWGVYIHAEEVQVGVLTMSWSSVLRVSALRSVITSGFRAVSVFEVPGSVRSTLGATLRPDHALYSTTMQATPNASHISAFNLRIVSPSAYRVCPLQNDTDTYLGIPADVAAVLPVDVVTDPNILLGMQTTVHIAELVKACHPSPDVVSAVGEHLNWLNKLLLPLKESTQLQGSESYKECLALLGRVHAAMKMVRIGLVVPQLQYRMYGSLINQMAQVAQNYDREFKQFKLFIIQNQILGSYLLQQNRAFAERELQMESFHAAVISQRRQELDDAIAKMDRLSLQMEAEDRAMEQAKKEMDEGLKQFQNRQVANALFAVLSAVAQIGLAFVTAGATAPGAVASAGQAVSIAGQAAQGLRRVVEILEQLEAVMEVVAAVKDLVDSLEQVGQIVDAPVMPELPSEADWSIFVNEVEAVAEGMPTEVSEVPVWRAKCKNVAALGREMSITAVQMSELQYDIWVQGLLRDIAQSHADRLAAIQPADLTNYLEMATQMDMRTTRMLLGLLNILRIQNAALRYEYLLMPTELTTWPLGMDTVGDLLIAQENAALIGLMQLGPSSDFTSRHVVKDIPVNLLLDGEDWEFEIPVQGGMSSFPSSWSRVRIRHLEMHFVQEASGGGEIIHQPATQTGTIHILLQGSTVFHDRRRDQVLPFQAAAPLNYHYAYRLDTGEATLTNEPSEQFANKFMQMTPFTRWRLRLSASAKENAGLAFPTATAPDSTTEIAITFHVTAIRQIDWRQEEE

SEQ ID NO: 568 - protein, 866 aa, synthetic construct
  REGION 1..866: note = PtIP-83 polypeptide variant
MALVDYGKLFEDLNQISMGVLDRVEFSEVMVIHRMYVRLADLNVGQLEGAEKVKRLYVFADVVELPVVEWRWPPQIPGSVTVIILCRLLQWPTDGRQSDTELHLTFMKLHAIQREENRWEITAADGMNWGVYIHAEEVQVGVLTMSWSSVLRVSALRSVITSGFRAVSVFEVPGSVRSTLGATLRPDHALYSTTMQATPNASHISAFNLRIVSPSAYRVCPLQNDTDTYLGIPADVAAVLPVDVVTDPNILLGMQTTVHIAELVKACHPSPDVVSAVGEHLNWLNKLLLPLKESTQLQGSESYKECLALLGRVHAAMKMVRIGLVVPQLQYRMYGSLINQMAQVAQNYDREFKQFKLFIIQNQILGSYLLQQNRAFADREVQMESFHAAVISQRREELDNTFAKMDRLSGQMEAESSAMEQAKKEMDEGLRQFQNRQVANALFAVLSAVAQIGLAFLTAGATAPGAVASAGQAVSIAGQAAQGLRRVVEILEQLEAVMEVVAAVKDLVDSLEQVSQIVDAPPMPDMPSEADWSIFVNEVEAVAEGMPTEVSEVPVWRAKCKNVAALGREMSITAEQISQLQYDIWVQGMMRDMARSQADRLAAIQPADLTNYLEMATQMDMRTTRMLLGLLNILRIQNAALMYEYLLTPTQLTAWPLRMDTVANLLITHESAALSGLAQLGPPSDFTSRHVVKDIPVNLLLDGEDWEFEIPVQAGMSSFPSSWTRVRIRHLEMHFVQEASGGGEIIHQPTTQTGTVYILLQGSTIFHDRRREEVMTFQAAVPLNYHYAYRLDTGEATLTNEPSEQFANTFMQMTPFTHWRLRLSASAAENKGLAFPTATAPDSTTEIAITFHVTAIRQIDWRQEEE

SEQ ID NO: 569 - protein, 866 aa, synthetic construct
  REGION 1..866: note = PtIP-83 polypeptide variant
MALVDYGKLFEDLNQISMGVLDRVEFSEVMVIHRMYVRLADLNVGQLEGAEKVKRLYVFADVVELPVVEWRWPPQIPGSVTVIILCRLLQWPTDGRQSDTELHLTFMKLHAIQREENRWEITAADGMNWGVYIHAEEVQVGVLTMSWSSVLRVSALRSVITSGFRAVSVFEVPGSVRSTLGATLRPDHALYSTTMQATPNASHISAFNLRIVSPSAYRVCPLQNDTDTYLGIPADVAAVLPVDVVTDPNILLGMQTTVHIAELVKACHPSPDVVSAVGEHLNWLNKLLLPLKESTQLQGSESYKECLALLGRVHAAMKMVRIGLVVPQLQYRMYGSLINQMAQVAQNYDREFKQFKLFIIQNQILGSYLLQQNKAFADREVQMESFHSAVISQRRQELDDAIAKMDRLSGQMEAESSAMEQAKKEMDEGLRQFQNRQVANALFAVLSAVAQIGLAFVTAGATAPGAVASAGQAVSIAGQAAQGLRRVVEILEGLEAVMEVVAAVKDLVDSLEQVGQIVDAPVMPELPSEADWSIFVNEVEAVAEGMPTEVSEVPVWRAKCKNVAALGREMCITAVQMSELQYDIWVQGLLRDMARSQADRLAAIQPADLTNYLEMATQMDMRTTRMLLGLLNILRIQNAALRYEYLLMPTELTTWPLGMDTVGDLLIAQENAALIGLMQLGPSSDFTSRHVVKGIPVSLLLDGGDWEFEIPVQAGMSSFPSSWTRVRIRHLEMHFVKEASGGGEIIHQPATQTGTIYILLQGSTIFHDRRRDQVLPFQAAAPLNYHYAYRLDTGEATLTNEPSEQFANTFMQMTPFTRWRLRLSASAAENKGLAFPTATAPDSTTEIAITFHVTAIRQIDWRHDEE

SEQ ID NO: 570 - protein, 867 aa, synthetic construct
  REGION 1..867: note = PtIP-83 polypeptide variant
MALVDYGKLFEDLNQISMGVLDRVEFSEVMVIHRMYVRLADLNVGQLEGAEKVKRLYVFADVVELPVVEWRWPPQIPGSVTVIILCRLLQWPTDGRQSDTELHLTFMKLHAIQREENRWEITAADGMNWGVYIHAEEVQVGVLTMSWSSVLRVSALRSVITSGFRAVSVFEVPGSVRSTLGATLRPDHALYSTTMQATPNASHISAFNLRIVSPSAYRVCPLQNDTDTYLGIPADVAAVLPVDVVTDPNILLGMQTTVHIAELVKACHPSPDVVSAVGEHLNWLNKLLLPLKESTQLQGSESYKECLALLGRVHAAMKMVRIGLVVPQLQYRMYGSLINQMAQVAQNYDREFKQFKLFIIQNQILGSYLLQQNRAFAERELQMESFHSAVISQRREELDNTFAKMDRLSGQMEAESSAMEQAKKEMDEGLRQFQNRQVANALFAVLSAVAQIGLAFLTAGATAPGAAASAAQAVNIAGQAAQALRRVVEILEGLEAVMEVVAAIKHLVDALDQVSQIVDAPVMPELPSEADWSIFVNEVEAVAEGMPTEVSEVPAWKAKCKNVAALGREMSITAVQMSELQYDIWVQGLLRDMARSQADRLAAIQPADLTNYLEMATQMDMRTTRMLLGLLNILRIQNAALRYEYLLMPTELTTWPLGMDTVGDLLITHESAALSGLAQLGPPSDFTSRHVVKGIPVSLLLDGEDWEFEIPVQAGMSSFPSSWSRVRIRHLEMHFVKEASGIGGEIIHQPTTQTGTVYILLQGSTVFHDRRREEVMTFQAAAPLNYHYAYRLDTGEATLTNEPSEQFANTFMQMTPFTRWRLRLSASAKENAGLAFPTATAPDSTTEIAITFHVTAIRQIDWRHDEE

SEQ ID NO: 571 - protein, 866 aa, synthetic construct
  REGION 1..866: note = PtIP-83 polypeptide variant
MALVDYGKLFEDLNQISMGVLDRVEFSEVMVIHRMYVRLADLNVGQLEGAEKVKRLYVFADVVELPVVEWRWPPQIPGSVTVIILCRLLQWPTDGRQSDTELHLTFMKLHAIQREENRWEITAADGMNWGVYIHAEEVQVGVLTMSWSSVLRVSALRSVITSGFRAVSVFEVPGSVRSTLGATLRPDHALYSTTMQATPNASHISAFNLRIVSPSAYRVCPLQNDTDTYLGIPADVAAVLPVDVVTDPNILLGMQTTVHIAELVKACHPSPDVVSAVGEHLNWLNKLLLPLKESTQLQGSESYKECLALLGRVHAAMKMVRIGLVVPQLQYRMYGSLINQMAQVAQNYDREFKQFKLFIIQNQILGSYLLQQNRAFAERELQMESFHAAVISQRREELDDAIAKMDRLSLQMEEEDRAMEQAKKEMDEGLRQFQNRQVANALFAVLSAVAQIGLAFVTAGATAPGAVASAGQAVSIAGQAAQGLRRVVEILEGLEAVMEVVAAVKDLVDSLEQVGQIVDAPVMPDMPSEADWSIFVNEVEAVAEGMPTEVSEVPVWRAKCKNVAALGREMCITAVQMSELQYDIWVQGMMRDMARSQADRLAAIQPADLTNYLEMATQMDMRTTRMLLGLLNIMRIQNAALMYEYLLTPTQLTAWPLRMDTVANLLITQENAALIGLMQLGPSSDFTSRHVVKDIPVNLLLDGEDWEFEIPVQGGMSSFPSSWSRVRIRHLEMHFVQEASGGGEIIHQPTTQTGTVYILLQGSTIFHDRRRDQVLPFQAAAPLNYHYAYRLDTGDSTLTNEPSEQFANKFMQMTPFTRWRLRLSASAAENKGLAFPTATAPDSTTEIAITFHVTAIRQIDWRQEEE

SEQ ID NO: 572 - protein, 866 aa, synthetic construct
  REGION 1..866: note = PtIP-83 polypeptide variant
MALVDYGKLFEDLNQISMGVLDRVEFSEVMVIHRMYVRLADLNVGQLEGAEKVKRLYVFADVVELPVVEWRWPPQIPGSVTVIILCRLLQWPTDGRQSDTELHLTFMKLHAIQREENRWEITAADGMNWGVYIHAEEVQVGVLTMSWSSVLRVSALRSVITSGFRAVSVFEVPGSVRSTLGATLRPDHALYSTTMQATPNASHISAFNLRIVSPSAYRVCPLQNDTDTYLGIPADVAAVLPVDVVTDPNILLGMQTTVHIAELVKACHPSPDVVSAVGEHLNWLNKLLLPLKESTQLQGSESYKECLALLGRVHAAMKMVRIGLVVPQLQYRMYGSLINQMAQVAQNYDREFKQFKLFIIQNQILGSYLLQQNRAFAERELQMESFHAAVISQRRQELDDAIAKMDRLSLQMEEEDRAMEQAKKEMDEGLRQFQNRQVANALFAVLSAVAQIGLASLTAGATAPGAVASAGQAVSIAGQAAQGLRRVVEILEGLEAVMEVVAAVKDLVDSLEQVGQIVDAPVMPELPSEADWSIFVNEVEAVAEGMPTEVSEVPVWRAKCKNVAALGREMCITAEQMSELQYDIWVQGMMRDMARSQADRLAAIQPADLTNYLEMAIQMDMRTTRMLLGLLNILRIQNAALRYEYLLMPTELTTWPLGMDTVGDLLIAQENAALIGLMQLGPSSDFTSRHVVKDIPVNLLLDGEDWEFEIPVQAGMSSFPSSWSRVRIRHLEMHFVQEASGGGEIIHQPATQTGTVYILLQGSTIFHDRRREEVMTFQAAVPLNYHYAYRLDTGDSTLTNEPSEQFANKFMQMTPFTRWRLRLSASAKENAGLAFPTATAPDSTTEIAITFHVTAIRQIDWRHDEE

SEQ ID NO: 573 - protein, 866 aa, synthetic construct
  REGION 1..866: note = PtIP-83 polypeptide variant
MALVDYGKLFEDLNQISMGVLDRVEFSEVMVIHRMYVRLADLNVGQLEGAEKVKRLYVFADVVELPVVEWRWPPQIPGSVTVIILCRLLQWPTDGRQSDTELHLTFMKLHAIQREENRWEITAADGMNWGVYIHAEEVQVGVLTMSWSSVLRVSALRSVITSGFRAVSVFEVPGSVRSTLGATLRPDHALYSTTMQATPNASHISAFNLRIVSPSAYRVCPLQNDTDTYLGIPADVAAVLPVDVVTDPNILLGMQTTVHIAELVKACHPSPDVVSAVGEHLNWLNKLLLPLKESTQLQGSESYKECLALLGRVHAAMKMVRIGLVVPQLQYRMYGSLINQMAQVAQNYDREFKQFKLFIIQNQILGSYLLQQNRAFAERELQMESFHAAVISQRRQELDDAIAKMDRLSLQMEEEDRAMEQARKEMEEGLRQFQNEQVARAVFAVLKSVAMIALAFVTAGATAPGAVASAGQAVSIAGQAAQGLRRVVEILEGLEAVMEVVAAVKDLVDSLEQVGQIVDAPVMPELPSEADWSIFVNEVEAVAEGMPTEVSEVPAWRAKCKNVAALGREMCITAVQMSELQYDIWVQGMMRDMARSQADRLAAIQPADLTNYLEMAIQMDMRTTRMLLGLLNILRIQNAALRYEYLLMPTELTTWPLGMDTVGDLLIAHESAALSGLAQLGPPSDFTSRHVVKGIPVSLLLDGGDWEFEIPVQGGMSSFPSSWTRVRIRHLEMHFVQEASGGGEIIHQPATQTGTIYILLQGSTVFHDRRRDQVLPFQAAAPLNYHYAYRLDTGDSTLTNEPSEQFANKFMQMTPFTHWRLRLSASAKENAGLAFPTATALDSTTQIVITFHVTAIRQIDWRQEEE

SEQ ID NO: 574 - protein, 867 aa, synthetic construct
  REGION 1..867: note = PtIP-83 polypeptide variant
MALVDYGKLFEDLNQISMGVLDRVEFSEVMVIHRMYVRLADLNVGQLEGAEKVKRLYVFADVVELPVVEWRWPPQIPGSVTVIILCRLLQWPTDGRQSDTELHLTFMKLHAIQREENRWEITAADGMNWGVYIHAEEVQVGVLTMSWSSVLRVSALRSVITSGFRAVSVFEVPGSVRSTLGATLRPDHALYSTTMQATPNASHISAFNLRIVSPSAYRVCPLQNDTDTYLGIPADVAAVLPVDVVTDPNILLGMQTTVHIAELVKACHPSPDVVSAVGEHLNWLNKLLLPLKESTQLQGSESYKECLALLGRVHAAMKMVRIGLVVPQLQYRMYGSLINQMAQVAQNYDREFKQFKLFIIQNQILGSYLLQQNRAFAERELQMESFHAAVISQRRQELDNTFAKMDRLSGQMEEEDRAMEQARKEMEEGLRQFQNRQVANALFAVLSAVAQIGLAFLTAGATAPGAVASAGQAVSIAGQAAQGLRRVVEILEGLEAVMEVVAAVKDLVDSLEQVGQIVDAPVMPELPSEADWSIFVNEIEAVAEGMPTEVSEVPAWKAKCKNVAALGREMSITAVQMSELQYDIWVQGMMRDMARSQADRLAAIQPADLTNYLEMATQMDMRTTRMLLGLLNIMRIQNAALMYEYLLTPTQLTAWPLGMDTVGDLLITHESAALSGLAQLGPPSDFTSRHVVKGIPVSLLLDGGDWEFEIPVQGGMSSFPSSWSRVRIRHLEMHFVKEASGIGGEIIHQPATQTGTIYILLQGSTVFHDRRRDQVLPFQAAAPLNYHYAYRLDTGEATLTNEPSEQFANKFMQMTPFTRWRLRLSASAKENAGLAFPTATALDSTTQIVITFHVTAIRQIDWRQEEE

SEQ ID NO: 575 - protein, 866 aa, synthetic construct
  REGION 1..866: note = PtIP-83 polypeptide variant
MALVDYGKLFEDLNQISMGVLDRVEFSEVMVIHRMYVRLADLNVGQLEGAEKVKRLYVFADVVELPVVEWRWPPQIPGSVTVIILCRLLQWPTDGRQSDTELHLTFMKLHAIQREENRWEITAADGMNWGVYIHAEEVQVGVLTMSWSSVLRVSALRSVITSGFRAVSVFEVPGSVRSTLGATLRPDHALYSTTMQATPNASHISAFNLRIVSPSAYRVCPLQNDTDTYLGIPADVAAVLPVDVVTDPNILLGMQTTVHIAELVKACHPSPDVVSAVGEHLNWLNKLLLPLKESTQLQGSESYKECLALLGRVHAAMKMVRIGLVVPQLQYRMYGSLINQMAQVAQNYDREFKQFKLFIIQNQILGSYLLQQNRAFAERELQMESFHSAVISQRRQELDDAIAKMDRLSGQMEAESSAMEQAKKEMDEGLRQFQNRQVANALFAVLSAVAQIGLALLTAGATAPGAVASAGQAVSIAGQAAQGLRRVVETLEQLEAVMEVVAAVKDLVDSLEQVGQIVDAPPMPDMPSEADWSIFVNEIEAVAEGMPTEVSEVPAWKAKCKNVAALGREMSITAVQMSELQYDIWVQGMMRDMARSQADRLAAIQPADLTNYLEMATQMDMRTTRMLLGLLNILRIQNAALRYEYLLMPTELTTWPLGMDTVGDLLIAQENAALIGLMQLGPSSDFTSRHVVKGIPVSLLLDGGDWEFEIPVQGGMSSFPSSWSRVRIRHLEMHFVQEASGGGEIIHQPTTQTGTVYILLQGSTIFHDRRREEVMTFQAAVPLNYHYAYRLDTGEATLTNEPSEQFANKFMQMTPFTRWRLRLSASAKENAGLAFPTATALDSTTQIVITFHVTAIRQIDWRHDEE

SEQ ID NO: 576 - protein, 867 aa, synthetic construct
  REGION 1..867: note = PtIP-83 polypeptide variant
MALVDYGKLFEDLNQISMGVLDRVEFSEVMVIHRMYVRLADLNVGQLEGAEKVKRLYVFADVVELPVVEWRWPPQIPGSVTVIILCRLLQWPTDGRQSDTELHLTFMKLHAIQREENRWEITAADGMNWGVYIHAEEVQVGVLTMSWSSVLRVSALRSVITSGFRAVSVFEVPGSVRSTLGATLRPDHALYSTTMQATPNASHISAFNLRIVSPSAYRVCPLQNDTDTYLGIPADVAAVLPVDVVTDPNILLGMQTTVHIAELVKACHPSPDVVSAVGEHLNWLNKLLLPLKESTQLQGSESYKECLALLGRVHAAMKMVRIGLVVPQLQYRMYGSLINQMAQVAQNYDREFKQFKLFIIQNQILGSYLLQQNRAFAERELQMESFHSAVISQRRQELDDAIAKMDRLSLQMEEEDRAMEQARKEMEEGLRQFQNRQVANALFAVLKSVAMIALAFVTAGATAPGAVASAGQAVSIAGQAAQGLRRVVEILEQLEAVMEVVAAVKDLVDSLEQVGQIVDAPVMPDMPSEADWSIFVNEVEAVAEGMPTEVSEVPVWRAKCKNVAALGREMSITAVQMSELQYDIWVQGMMRDMARSQADRLAAIQPANLTNYLEMATQMDMRTTRMLLGLLNIMRIQNAALRYEYLLMPTELTTWPLGMDTVGDLLIAQENAALIGLMQLGPSSDFTSRHVVKGIPVSLLLDGGDWEFEIPVQGGMSSFPSSWSRVRIRHLEMHFVQEASGIGGEIIHQPATQTGTIYILLQGSTVFHDRRRDQVLPFQAAAPLNYHYAYRLDTGDSTLTNEPSEQFANKFMQMTPFTRWRLRLSASAKENAGLAFPTATALDSTTEIAITFHVTAIRQIDWRQEEE

SEQ ID NO: 577 - protein, 866 aa, synthetic construct
  REGION 1..866: note = PtIP-83 polypeptide variant
MALVDYGKLFEDLNQISMGVLDRVEFSEVMVIHRMYVRLADLNVGQLEGAEKVKRLYVFADVVELPVVEWRWPPQIPGSVTVIILCRLLQWPTDGRQSDTELHLTFMKLHAIQREENRWEITAADGMNWGVYIHAEEVQVGVLTMSWSSVLRVSALRSVITSGFRAVSVFEVPGSVRSTLGATLRPDHALYSTTMQATPNASHISAFNLRIVSPSAYRVCPLQNDTDTYLGIPADVAAVLPVDVVTDPNILLGMQTTVHIAELVKACHPSPDVVSAVGEHLNWLNKLLLPLKESTQLQGSESYKECLALLGRVHAAMKMVRIGLVVPQLQYRMYGSLINQMAQVAQNYDREFKQFKLFIIQNQILGSYLLQQNRAFAERELQMESFHAAVISQRREELDNTFAKMDRLSGQMEAESSAMEQAKKEMDEGLRQFQNRQVANALFAVLSAVAQIGLAFLTAGATAPGAAASAAQAVNIAGQAAQGLRRVVEILEGLEAVMEVVAAVKDLVDSLEQVGQIVDAPVMPELPSEADWSIFVNEVEAVAEGMPTEVSEVPAWKAKCKNVAALGREMSITAEQISQLQYDIWVQGMMRDMARSQADRLAAIQPADLTNYLEMATQMDMRTTRMLLGLLNILRIQNAALRYEYLLMPTELTTWPLGMDTVGDLLIAQENAALIGLAQLGPPSDFTSRHVVKGIPVSLLLDGGDWEFEIPVQAGMSSFPSSWTRVRIRHLEMHFVQEASGGGEIIHQPATQTGTIYILLQGSTVFHDRRREEVMTFQAAAPLNYHYAYRLDTGDSTLTNEPSEQFANTFMQMTPFTHWRLRLSASAKENAGLAFPTATALDSTTEIAITFHVTAIRQIDWRQEEE

SEQ ID NO: 578 - protein, 867 aa, synthetic construct
  REGION 1..867: note = PtIP-83 polypeptide variant
MALVDYGKLFEDLNQISMGVLDRVEFSEVMVIHRMYVRLADLNVGQLEGAEKVKRLYVFADVVELPVVEWRWPPQIPGSVTVIILCRLLQWPTDGRQSDTELHLTFMKLHAIQREENRWEITAADGMNWGVYIHAEEVQVGVLTMSWSSVLRVSALRSVITSGFRAVSVFEVPGSVRSTLGATLRPDHALYSTTMQATPNASHISAFNLRIVSPSAYRVCPLQNDTDTYLGIPADVAAVLPVDVVTDPNILLGMQTTVHIAELVKACHPSPDVVSAVGEHLNWLNKLLLPLKESTQLQGSESYKECLALLGRVHAAMKMVRIGLVVPQLQYRMYGSLINQMAQVAQNYDREFKQFKLFIIQNQILGSYLLQQNRAFAERELQMESFHSAVISQRREELDNTFAKMDRLSGQMEAESSAMEQAKKEMDEGLRQFQNRQVANALFAVLSAVAQIGLAFLTAGATAPGAVASAGQAVSIAGQAAQGLRRVVEILEQLEAVMEVVAAVKDLVDSLEQVGQIVDAPVMPDMPSEADWSIFVNEVEAVAEGMPTEVSEVPVWRAKCKNVAALGREMSITAVQMSELQYDIWVQGLLRDIAQSHADRLAAIQPANLTNYLEMATQMDMRTTRMLLGLLNILRIQNAALRYEYLLMPTELTTWPLGMDTVANLLITHESAALSGLAQLGPPSDFTSRHVVKGIPVSLLLDGGDWEFEIPVQGGMSSFPSSWTRVRIRHLEMHFVQEASGIGGEIIHQPTTQTGTVYILLQGSTTFHDRRRDQVLPFQAAAPLNYHYAYRLDTGDSTLTNEPSEQFANKFMQMTPFTRWRLRLSASAAENKGLAFPTATAPDSTTEIAITFHVTAIRQIDWRHDEE

SEQ ID NO: 579 - protein, 867 aa, synthetic construct
  REGION 1..867: note = PtIP-83 polypeptide variant
MALVDYGKLFEDLNQISMGVLDRVEFSEVMVIHRMYVRLADLNVGQLEGAEKVKRLYVFADVVELPVVEWRWPPQIPGSVTVIILCRLLQWPTDGRQSDTELHLTFMKLHAIQREENRWEITAADGMNWGVYIHAEEVQVGVLTMSWSSVLRVSALRSVITSGFRAVSVFEVPGSVRSTLGATLRPDHALYSTTMQATPNASHISAFNLRIVSPSAYRVCPLQNDTDTYLGIPADVAAVLPVDVVTDPNILLGMQTTVHIAELVKACHPSPDVVSAVGEHLNWLNKLLLPLKESTQLQGSESYKECLALLGRVHAAMKMVRIGLVVPQLQYRMYGSLINQMAQVAQNYDREFKQFKLFIIQNQILGSYLLQQNRAFAERELQMESFHSAVISQRRQELDDAIAKMDRLSLQMEEEDRAMEQARKEMEEGLKQFQNEQVARAVFAVLKSVAMIALAFVTAGATAPGAVASAGQAVSIAGQAAQGLRRVVEILEGLEAVMEVVAAVKDLVDSLEQVGQIVDAPPMPDMPSEADWSIFVNEVEAVAEGMPTEVSEVPAWKAKCKNVAALGREMCITAEQISQLQYDIWVQGMMRDMARSQADRLAAIQPADLTNYLEMAIQMDMRTTRMLLGLLNILRIQNAALRYEYLLMPTELTTWPLRMDTVANLLITHESAALSGLAQLGPPSDFTSRHVVKDIPVNLLLDGEDWEFEIPVQGGMSSFPSSWSRVRIRHLEMHFVKEASGIGGEIIHQPATQTGTVYILLQGSTVFHDRRREEVMTFQAAVPLNYHYAYRLDTGDSTLTNEPSEQFANKFMQMTPFTRWRLRLSASAKENAGLAFPTATAPDSTTEIAITFHVTAIRQIDWRHDEE

SEQ ID NO: 580 - protein, 866 aa, synthetic construct
  REGION 1..866: note = PtIP-83 polypeptide variant
MALVDYGKLFEDLNQISMGVLDRVEFSEVMVIHRMYVRLADLNVGQLEGAEKVKRLYVFADVVELPVVEWRWPPQIPGSVTVIILCRLLQWPTDGRQSDTELHLTFMKLHAIQREENRWEITAADGMNWGVYIHAEEVQVGVLTMSWSSVLRVSALRSVITSGFRAVSVFEVPGSVRSTLGATLRPDHALYSTTMQATPNASHISAFNLRIVSPSAYRVCPLQNDTDTYLGIPADVAAVLPVDVVTDPNILLGMQTTVHIAELVKACHPSPDVVSAVGEHLNWLNKLLLPLKESTQLQGSESYKECLALLGRVHAAMKMVRIGLVVPQLQYRMYGSLINQMAQVAQNYDREFKQFKLFIIQNQILGSYLLQQNRAFAERELQMESFHAAVISQRREELDDAIAKMDRLSLQMEEEDRAMEQAKKEMDEGLRQFQNRQVANALFAVLSAVAQIGLAFVTAGATAPGAVASAGQAVSIAGQAAQGLRRVVEILEGLEAVMEVVAAVKDLVDSLEQVGQIVDAPVMPELPSEADWSIFVNEVEAVAEGMPTEVSEVPVWRAKCKNVAALGREMCITAEQISQLQYDIWVQGMMRDTAQSHADRLAAIQPADLTNYLEMATQMDMRTTRMLLGLLNILRIQNAALRYEYLLMPTELTTWPLGMDTVGDLLIAHESAALSGLAQLGPPSDFTSRHVVKDIPVSLLLDGEDWEFEIPVQAGMSSFPSSWSRVRIRHLEMHFVKEASGGGEIIHQPTTQTGTVYILLQGSTVFHDRRRDQVLPFQAAAPLNYHYAYRLDTGDSTLTNEPSEQFANKFMQMTPFTRWRLRLSASAKENAGLAFPTATAPDSTTEIAITFHVTAIRQIDWRHDEE

SEQ ID NO: 581 - protein, 866 aa, synthetic construct
  REGION 1..866: note = PtIP-83 polypeptide variant
MALVDYGKLFEDLNQISMGVLDRVEFSEVMVIHRMYVRLADLNVGQLEGAEKVKRLYVFADVVELPVVEWRWPPQIPGSVTVIILCRLLQWPTDGRQSDTELHLTFMKLHAIQREENRWEITAADGMNWGVYIHAEEVQVGVLTMSWSSVLRVSALRSVITSGFRAVSVFEVPGSVRSTLGATLRPDHALYSTTMQATPNASHISAFNLRIVSPSAYRVCPLQNDTDTYLGIPADVAAVLPVDVVTDPNILLGMQTTVHIAELVKACHPSPDVVSAVGEHLNWLNKLLLPLKESTQLQGSESYKECLALLGRVHAAMKMVRIGLVVPQLQYRMYGSLINQMAQVAQNYDREFKQFKLFIIQNQILGSYLLQQNRAFAERELQMESFHSAVISQRRQELDDAIAKMDRLSLQMEEEDRAMEQARKEMEEGLKQFQNEQVARAVFAVLKSVAMIALAFVTAGATAPGAVASAGQAVSIAGQAAQGLRRVVEILEGLEAVMEVVAAVKDLVDSLEQVGQIVDAPVMPELPSEADWSIFVNEIEAVAEGMPTEVSEVPVWRAKCKNVAALGREMCITAEQISQLQYDIWVQGMMRDMARSQADRLAAIQPADLTNYLEMATQMDMRTTRMLLGLLNILRIQNAALRYEYLLMPTELTTWPLGMDTVGDLLIAHESAALSGLAQLGPPSDFTSRHVVKGIPVSLLLDGEDWEFEIPVQGGMSSFPSSWTRVRIRHLEMHFVQEASGGGEIIHQPTTQTGTIYILLQGSTVFHDRRRDQVLPFQAAAPLNYHYAYRLDTGEATLTNEPSEQFANKFMQTTPFTHWRLRLSASAAENKGLAFPTATAPDSTTEIAITFHVTAIRQIDWRQEEE

SEQ ID NO: 582 - protein, 866 aa, synthetic construct
  REGION 1..866: note = PtIP-83 polypeptide variant
MALVDYGKLFEDLNQISMGVLDRVEFSEVMVIHRMYVRLADLNVGQLEGAEKVKRLYVFADVVELPVVEWRWPPQIPGSVTVIILCRLLQWPTDGRQSDTELHLTFMKLHAIQREENRWEITAADGMNWGVYIHAEEVQVGVLTMSWSSVLRVSALRSVITSGFRAVSVFEVPGSVRSTLGATLRPDHALYSTTMQATPNASHISAFNLRIVSPSAYRVCPLQNDTDTYLGIPADVAAVLPVDVVTDPNILLGMQTTVHIAELVKACHPSPDVVSAVGEHLNWLNKLLLPLKESTQLQGSESYKECLALLGRVHAAMKMVRIGLVVPQLQYRMYGSLINQMAQVAQNYDREFKQFKLFIIQNQILGSYLLQQNKAFADREVQMESFHAAVISQRRQELDDAIAKMDRLSLQMEEEDRAMEQARKEMEEGLKQFQNEQVARAVFAVLKSVAMIALAFVTAGATAPGAVASAGQAVSIAGQAAQGLRRVVEILEQLEAVMEVVAAVKDLVDSLEQVGQIVDAPVMPELPSEADWSIFVNEVEAVAEGMPTEVSEVPVWRAKCKNVAALGREMCITAEQISQLQYDIWVQGLLRDIARSQADRLAAIQPADLTNYLEMAIQMDMRTTRILIGLLNIMRIQNAALMYEYLLTPTQLTAWPLRMDTVANLLITHESAALSGLAQLGPPSDFTSRHVVKGIPVSLLLDGGDWEFEIPVQGGMSSFPSSWSRVRIRHLEMHFVQEASGGGEIIHQPATQTGTIYILLQGSTIFHDRRRDQVLPFQAAAPLNYHYAYRLDTGDSTLTNEPSEQFANKFMQMTPFTRWRLRLSASAAENKGLAFPTATAPDSTTEIAITFHVTAIRQIDWRQEEE

SEQ ID NO: 583 - protein, 866 aa, synthetic construct
  REGION 1..866: note = PtIP-83 polypeptide variant
MALVDYGKLFEDLNQISMGVLDRVEFSEVMVIHRMYVRLADLNVGQLEGAEKVKRLYVFADVVELPVVEWRWPPQIPGSVTVIILCRLLQWPTDGRQSDTELHLTFMKLHAIQREENRWEITAADGMNWGVYIHAEEVQVGVLTMSWSSVLRVSALRSVITSGFRAVSVFEVPGSVRSTLGATLRPDHALYSTTMQATPNASHISAFNLRIVSPSAYRVCPLQNDTDTYLGIPADVAAVLPVDVVTDPNILLGMQTTVHIAELVKACHPSPDVVSAVGEHLNWLNKLLLPLKESTQLQGSESYKECLALLGRVHAAMKMVRIGLVVPQLQYRMYGSLINQMAQVAQNYDREFKQFKLFIIQNQILGSYLLQQNRAFAERELQMESFHSAVISQRRQELDDAIAKMDRLSLQMEAESSAMEQAKKEMDEGLRQFQNRQVARAVFAVLKSVAMIALAFVTAGATAPGAVASAGQAVSIAGQAAQALRRVVEILEQLEAVMEVVAAVKDLVDSLEQVGQIVDAPVMPELPSEADWSIFVNEVEAVAEGMPTEVSEVPAWKAKCKNVAALGREMSITAVQMSELQYDIWVQGMMRDMARSQADRLAAIQPADLTNYLEMATQMDMRTTRMLLGLLNILRIQNAALRYEYLLMPTELTTWPLGMDTVGDLLIAQENAALIGLMQLGPSSDFTSRHVVKGIPVSLLLDGGDWEFEIPVQGGMSSFPSSWSRVRIRHLEMHFVQEASGGGEIIHQPATQTGTIYILLQGSTIFHDRRRDQVLPFQAAAPLNYHYAYRLDTGEATLTNEPSEQFANTFMQMTPFTHWRLRLSASAKENAGLAFPTATALDSTTQIVITFHVTAVRQIDWRHDEE

SEQ ID NO: 584 - protein, 867 aa, synthetic construct
  REGION 1..867: note = PtIP-83 polypeptide variant
MALVDYGKLFEDLNQISMGVLDRVEFSEVMVIHRMYVRLADLNVGQLEGAEKVKRLYVFADVVELPVVEWRWPPQIPGSVTVIILCRLLQWPTDGRQSDTELHLTFMKLHAIQREENRWEITAADGMNWGVYIHAEEVQVGVLTMSWSSVLRVSALRSVITSGFRAVSVFEVPGSVRSTLGATLRPDHALYSTTMQATPNASHISAFNLRIVSPSAYRVCPLQNDTDTYLGIPADVAAVLPVDVVTDPNILLGMQTTVHIAELVKACHPSPDVVSAVGEHLNWLNKLLLPLKESTQLQGSESYKECLALLGRVHAAMKMVRIGLVVPQLQYRMYGSLINQMAQVAQNYDREFKQFKLFIIQNQILGSYLLQQNRAFADREVQMESFHSAVISQRREELDNTFAKMDRLSGQMEAESSAMEQAKKEMDEGLRQFQNRQVANALFAVLSAVAQIGLAFLTAGATAPGAVASAGQAVSIAGQAAQGLRRVVEILEQLEAVMEVVAAVKDLVDSLEQVGQIVDAPVMPELPSEADWSIFVNEVEAVAEGMPTEVSEVPVWRAKCKNVAALGREMSITAVQMSELQYVIWVQGMMRDMARSQADRLAAIQPADLTNYLEMATQMDMRTTRMLLGLLNILRIQNAALMYEYLLTPTQLTAWPLRMDTVANLLITHESAALSGLAQLGPPSDFTSRHVVKGIPVSLLLDGGDWEFEIPVQGGMSSFPSSWSRVRIRHLEMHFVKEASGIGGEIIHQPATQTGTIYILLQGSTVFHDRRRDQVLPFQAAAPLNYHYAYRLDTGDSTLTNEPSEQFANTFMQMTPFTHWRLRLSASAAENKGLAFPTATAPDSTTEIAITFHVTAIRQIDWRQEEE

SEQ ID NO: 585 - protein, 866 aa, synthetic construct
  REGION 1..866: note = PtIP-83 polypeptide variant
MALVDYGKLFEDLNQISMGVLDRVEFSEVMVIHRMYVRLADLNVGQLEGAEKVKRLYVFADVVELPVVEWRWPPQIPGSVTVIILCRLLQWPTDGRQSDTELHLTFMKLHAIQREENRWEITAADGMNWGVYIHAEEVQVGVLTMSWSSVLRVSALRSVITSGFRAVSVFEVPGSVRSTLGATLRPDHALYSTTMQATPNASHISAFNLRIVSPSAYRVCPLQNDTDTYLGIPADVAAVLPVDVVTDPNILLGMQTTVHIAELVKACHPSPDVVSAVGEHLNWLNKLLLPLKESTQLQGSESYKECLALLGRVHAAMKMVRIGLVVPQLQYRMYGSLINQMAQVAQNYDREFKQFKLFIIQNQILGSYLLQQNRAFAERELQMESFHAAVISQRRQELDDAIAKMDRLSLQMEEEDRAMEQARKEMEEGLKQFQNEQVARAVFAVLKSVAMIALAFVTAGATAPGAAASAAQAVSIAGQAAQGLRRVVEILEGLEAVMEVVAAVKDLVDSLEQVGQIVDAPVMPELPSEADWSIFVNEVEAVAEGMPTEVSEVPVWRAKCKNVAALGREMCITAVQMSELQYDIWVQGMMRDMARSQADRLAAIQPADLTNYLEMATQMDMRTTRMLLGLLNILRIQNAALRYEYLLMPTELTTWPLGMDTVGDLLIAQENAALIGLMQLGPSSDFTSRHVVKGIPVSLLLDGGDWEFEIPVQGGMSSFPSSWSRVRIRHLEMHFVQEASGGGEIIHQPATQTGTIYILLQGSTVFHDRRREEVMTFQAAVPLNYHYAYRLDTGEATLTNEPSEQFANTFMQMTPFTHWRLRLSASAKENAGLAFPTATAPDSTTEIAITFHVTAIRQIDWRHDEE

SEQ ID NO: 586 - protein, 866 aa, synthetic construct
  REGION 1..866: note = PtIP-83 polypeptide variant
MALVDYGKLFEDLNQISMGVLDRVEFSEVMVIHRMYVRLADLNVGQLEGAEKVKRLYVFADVVELPVVEWRWPPQIPGSVTVIILCRLLQWPTDGRQSDTELHLTFMKLHAIQREENRWEITAADGMNWGVYIHAEEVQVGVLTMSWSSVLRVSALRSVITSGFRAVSVFEVPGSVRSTLGATLRPDHALYSTTMQATPNASHISAFNLRIVSPSAYRVCPLQNDTDTYLGIPADVAAVLPVDVVTDPNILLGMQTTVHIAELVKACHPSPDVVSAVGEHLNWLNKLLLPLKESTQLQGSESYKECLALLGRVHAAMKMVRIGLVVPQLQYRMYGSLINQMAQVAQNYDREFKQFKLFIIQNQILGSYLLQQNRAFAERELQMESFHSAVISQRREELDNTFAKMDRLSGQMEAESSAMEQAKKEMDEGLRQFQNRQVANALFAVLSAVAQIGLAFLTAGATAPGAVASAGQAVSIAGQAAQGLRRVVEILEGLEAVMEVVAAIKHLVDALDQVSQIVDAPPMPDMPSEADWSIFVNEVEAVAEGMPTEVSEVPAWKAKCKNVAALGREMCITAEQISQLQYDIWVQGLLRDIAQSQADRLAAIQPADLTNYLEMATQMDMRTTRMLLGLLNILRIQNAALRYEYLLTPTQLTAWPLRMDTVANLLITHESAALSGLAQLGPPSDFTSRHVVKDIPVNLLLDGEDWEFEIPVQGGMSSFPSSWTRVRIRHLEMHFVQEASGGGEIIHQPATQTGTIYILLQGSTIFHDRRREEVMTFQAAVPLNYHYAYRLDTGDSTLTNEPSEQFANTFMQMTPFTRWRLRLSASAKENAGLAFPTATAPDSTTEIAITFHVTAIRQIDWRQEEE

SEQ ID NO: 587 - protein, 867 aa, synthetic construct
  REGION 1..867: note = PtIP-83 polypeptide variant
MALVDYGKLFEDLNQISMGVLDRVEFSEVMVIHRMYVRLADLNVGQLEGAEKVKRLYVFADVVELPVVEWRWPPQIPGSVTVIILCRLLQWPTDGRQSDTELHLTFMKLHAIQREENRWEITAADGMNWGVYIHAEEVQVGVLTMSWSSVLRVSALRSVITSGFRAVSVFEVPGSVRSTLGATLRPDHALYSTTMQATPNASHISAFNLRIVSPSAYRVCPLQNDTDTYLGIPADVAAVLPVDVVTDPNILLGMQTTVHIAELVKACHPSPDVVSAVGEHLNWLNKLLLPLKESTQLQGSESYKECLALLGRVHAAMKMVRIGLVVPQLQYRMYGSLINQMAQVAQNYDREFKQFKLFIIQNQILGSYLLQQNRAFAERELQMESFHAAVISQRREELDNTFAKMDRLSGQMEEEDRAMEQAKKEMDEGLRQFQNRQVANALFAVLSAVAQIGLAFLTAGATAPGAVVSAGQAVSIAGQAAQGLRRVVEILEQLEAVMEVVAAVKDLVDSLEQVGQIVDAPVMPELPSEADWSIFVNEVEAVAEGMPTEVSEVPAWKAKCKNVAALGREMCITAEQISQLQYDIWVQGMMRDMARSQADRLAAIQPADLTNYLEMATQMDMRTTRMLLGLLNIMRIQNAALRYEYLLMPTELTTWPLGMDTVGDLLIAQENAALIGLMQLGPSSDFTSRHVVKGIPVSLLLDGGDWEFEIPVQGGMSSFPSSWTRVRIRHLEMHFVQEASGIGGEIIHQPTTQTGTVYILLQGSTIFHDRRRDQVLPFQAAAPLNYHYAYRLDTGEATLTNEPSEQFANTFMQMTPFTRWRLRLSAAAKENAGLAFPTATALDSTTQIVITFHVTAIRQIDWRHEEE

SEQ ID NO: 588 - protein, 866 aa, synthetic construct
  REGION 1..866: note = PtIP-83 polypeptide variant
MALVDYGKLFEDLNQISMGVLDRVEFSEVMVIHRMYVRLADLNVGQLEGAEKVKRLYVFADVVELPVVEWRWPPQIPGSVTVIILCRLLQWPTDGRQSDTELHLTFMKLHAIQREENRWEITAADGMNWGVYIHAEEVQVGVLTMSWSSVLRVSALRSVITSGFRAVSVFEVPGSVRSTLGATLRPDHALYSTTMQATPNASHISAFNLRIVSPSAYRVCPLQNDTDTYLGIPADVAAVLPVDVVTDPNILLGMQTTVHIAELVKACHPSPDVVSAVGEHLNWLNKLLLPLKESTQLQGSESYKECLALLGRVHAAMKMVRIGLVVPQLQYRMYGSLINQMAQVAQNYDREFKQFKLFIIQNQILGSYLLQQNRAFAERELQMESFHAAVISQRREELDNTFAKMDRLSGQMEAESSAMEQAKKEMDEGLRQFQNRQVANALFAVLSAVAQIGLAFLTAGATAPGAVASAGQAVSIAGQAAQGLRRVVEILEGLEAVMEVVAAVKDLVDSLEQVGQIVDAPVMPELPSEADWSIFVNEIEAVAEGMPTEVSEVPAWRAKCKNVAALGREMSITAVQMSELQYDIWVQGMMRDMARSQADRLAAIQPADLTNYLEMAIQMDMRTTRMLLGLLNILRIQNAALRYEYLLMPTELTTWPLGMDTVGDLLIAQENAALIGLAQLGPPSDFTSRHVVKGIPVSLLLDGGDWEFEIPVQGGMSSFPSSWSRVRIRHLEMHFVQEASGGGEIIHQPATQTGTIYILLQGSTVFHDRRRDQVLPFQAAAPLNYHYAYRLDTGEATLTNEPSEQFANKFMQMTPFTHWRLRLSASAAENKGLAFPTATAPDSTTEIVITFHVTAIRQIDWRQEEE

SEQ ID NO: 589 - protein, 866 aa, synthetic construct
  REGION 1..866: note = PtIP-83 polypeptide variant
MALVDYGKLFEDLNQISMGVLDRVEFSEVMVIHRMYVRLADLNVGQLEGAEKVKRLYVFADVVELPVVEWRWPPQIPGSVTVIILCRLLQWPTDGRQSDTELHLTFMKLHAIQREENRWEITAADGMNWGVYIHAEEVQVGVLTMSWSSVLRVSALRSVITSGFRAVSVFEVPGSVRSTLGATLRPDHALYSTTMQATPNASHISAFNLRIVSPSAYRVCPLQNDTDTYLGIPADVAAVLPVDVVTDPNILLGMQTTVHIAELVKACHPSPDVVSAVGEHLNWLNKLLLPLKESTQLQGSESYKECLALLGRVHAAMKMVRIGLVVPQLQYRMYGSLINQMAQVAQNYDREFKQFKLFIIQNQILGSYLLQQNRAFAERELQMESFHAAVISQRREELDNTFAKMDRLSGQMEAESSAMEQAKKEMDEGLRQFQNRQVANALFAVLSAVAQIGLAFLTAGATAPGAVASAGQAVSIAGQAAQGLRRVVEILEGLEAVMEVVAAIKHLVDALEQVGQIVDAPPMPDMPSEADWSIFVNEVEAVAEGMPTEVSEVPAWKAKCKNVAALGREMSITAVQMSELQYDIWVQGLLRDIARSQADRLAAIQPADLTNYLEMATQMDMRTTRMLLGLLNILRIQNAALRYEYLLMPTELTTWPLGMDTVGDLLITHESAALSGLAQLGPPSDFTSRHVVKGIPVSLLLDGGDWEFEIPVQGGMSSFPSSWTRVRIRHLEMHFVQEASGGGEIIHQPTTQTGTVYILLQGSTVFHDRRRDQVLPFQAAAPLNYHYAYRLDTGDSTLTNEPSEQFANKFMQMTPFTRWRLRLSASAKENAGLAFPTATAPDSTTQIVITFHVTAIRQIDWRQEEE

SEQ ID NO: 590 - protein, 866 aa, synthetic construct
  REGION 1..866: note = PtIP-83 polypeptide variant
MALVDYGKLFEDLNQISMGVLDRVEFSEVMVIHRMYVRLADLNVGQLEGAEKVKRLYVFADVVELPVVEWRWPPQIPGSVTVIILCRLLQWPTDGRQSDTELHLTFMKLHAIQREENRWEITAADGMNWGVYIHAEEVQVGVLTMSWSSVLRVSALRSVITSGFRAVSVFEVPGSVRSTLGATLRPDHALYSTTMQATPNASHISAFNLRIVSPSAYRVCPLQNDTDTYLGIPADVAAVLPVDVVTDPNILLGMQTTVHIAELVKACHPSPDVVSAVGEHLNWLNKLLLPLKESTQLQGSESYKECLALLGRVHAAMKMVRIGLVVPQLQYRMYGSLINQMAQVAQNYDREFKQFKLFIIQNQILGSYLLQQNRAFAERELQMESFHAAVISQRREELDDAIAKMDRLSLQMEEEDRAMEQARKEMEEGLKQFQNEQVARAVFAVLKSVAQIGLAFVTAGATAPGAVASAGQAVSIAGQAAQGLRRVVEILEGLEAVMEVVAAVKDLVDSLEQVGQIVDAPVMPELPSEADWSIFVNEVEAVAEGMPTEVSEVPAWKAKCKNVAALGREMSITAEQMSELQYDIWVQGMMRDMARSQADRLAAIQPADLTNYLEMATQMDMRTTRMLLGLLNIMRIQNAALRYEYLLMPTELTTWPLGMDTVGDLLITHESAALSGLAQLGPPSDFTSRHVVKGIPVSLLLDGGDWEFEIPVQGGMSSFPSSWSRVRIRHLEMHFVKEASGGGEIIHQPATQTGTIYILLQGSTIFHDRRREEVMTFQAAVPLNYHYAYRLDTGDSTLTNEPSEQFANTFMQMTPFTRWRLRLSASAAENKGLAFPTATAPDSTTEIVITFHVTAIRQIDWRQEEE

SEQ ID NO: 591 - protein, 866 aa, synthetic construct
  REGION 1..866: note = PtIP-83 polypeptide variant
MALVDYGKLFEDLNQISMGVLDRVEFSEVMVIHRMYVRLADLNVGQLEGAEKVKRLYVFADVVELPVVEWRWPPQIPGSVTVIILCRLLQWPTDGRQSDTELHLTFMKLHAIQREENRWEITAADGMNWGVYIHAEEVQVGVLTMSWSSVLRVSALRSVITSGFRAVSVFEVPGSVRSTLGATLRPDHALYSTTMQATPNASHISAFNLRIVSPSAYRVCPLQNDTDTYLGIPADVAAVLPVDVVTDPNILLGMQTTVHIAELVKACHPSPDVVSAVGEHLNWLNKLLLPLKESTQLQGSESYKECLALLGRVHAAMKMVRIGLVVPQLQYRMYGSLIRQMAQVAQNYDREFKQFKLFIIQNQILGSYLLQQNRAFAERELQMESFHAAVISQRRQELDDAIAKMDRLSLQMEEEDRAMEQARKEMDEGLRQFQNRQVANALFAVLSAVAQIGLAFLTAGATAPGAVASAGQAVSIAGQAAQGLRRVVEILEQLEAVMEVVAAVKDLVDSLEQVGQIVDAPVMPELPSEADWSIFVNEIEAVAEGMPTEVSEVPVWRAKCKNVAALGREMCITAVQMSELQYDIWVQGLLRDMARSQADRLAAIQPADLTNYLEMATQMDMRTTRMLLGLLNILRIQNAALRYEYLLMPTQLTAWPLRMDTVANLLITHESAALSGLAQLGPPSDFTSRHVVKGIPVSLLLDGGDWEFEIPVQGGMSSFPSSWTRVRIRHLEMHFVQEASGGGEIIHQPTTQTGTVYILLQGSTIFHDRRRDQVLPFQAAAPLNYHYAYRLDTGDSTLTNEPSEQFANKFMQMTPFTRWRLRLSASAKENAGLAFPTATALDSTTQIVITFHVTAIRQIDWRHDEE

SEQ ID NO: 592 - protein, 867 aa, synthetic construct
  REGION 1..867: note = PtIP-83 polypeptide variant
MALVDYGKLFEDLNQISMGVLDRVEFSEVMVIHRMYVRLADLNVGQLEGAEKVKRLYVFADVVELPVVEWRWPPQIPGSVTVIILCRLLQWPTDGRQSDTELHLTFMKLHAIQREENRWEITAADGMNWGVYIHAEEVQVGVLTMSWSSVLRVSALRSVITSDFRAVSVFEVPGSVRSTLGATLRPDHALYSTTMQATPNASHISAFNLRIVSPSAYRVCPLQNDTDTYLGIPADVAAVLPVDVVTDPNILLGMQTTVHIAELVKACHPSPDVVSAVGEHLNWLNKLLLPLKESTQLQGSESYKECLALLGRVHAAMKMVRIGLVVPQLQYRMYGSLINQMAQVAQNYDREFKQFKLFIIQNQILGSYLLQQNRAFAEREVQMESFHSAVISQRRQELDNTFAKMDRLSLQMEEEDRAMEQARKEMEEGLKQFQNEQVARAVFAVLKSVAMIALAFVTAGATAPGAVASAGQAVSIAGQAAQALRRVVEILEGLEAVMEVVAAVKDLVDSLEQVGQIVDAPVMPELPSEADWSIFVNEVEAVAEGMPTEVSEVPAWKAKCKNVAALGREMCITAVQMSELQYDIWVQGMMRDMARSQADRLAAIQPADLTNYLEMATQMDMRTTRILIGLLNILRIQNAALMYEYLLTPTQLTAWPLRMDTVANLLITHESAALSGLAQLGPPSDFTSRHVVKDIPVNLLLDGEDWEFEIPVQAGMSSFPSSWTRVRIRHLEMHFVKEASGIGGEIIHQPATQTGTVYILLQGSTIFHDRRREEVMTFQAAVPLNYHYAYRLDTGEATLTNEPSEQFANTFMQMTPFTHWRLRLSASAAENKGLAFPTATALDSTTQIVITFHVTAIRQIDWRHDEE

SEQ ID NO: 593 - protein, 866 aa, synthetic construct
  REGION 1..866: note = PtIP-83 polypeptide variant
MALVDYGKLFEDLNQISMGVLDRVEFSEVMVIHRMYVRLADLNVGQLEGAEKVKRLYVFADVVELPVVEWRWPPQIPGSVTVIILCRLLQWPTDGRQSDTELHLTFMKLHAIQREENRWEITAADGMNWGVYIHAEEVQVGVLTMSWSSVLRVSALRSVITSGFRAVSVFEVPGSVRSTLGATLRPDHALYSTTMQATPNASHISAFNLRIVSPSAYRVCPLQNDTDTYLGIPADVAAVLPVDVVTDPNILLGMQTTVHIAELVKACHPSPDVVSAVGEHLNWLNKLLLPLKESTQLQGSESYKECLALLGRVHAAMKMVRIGLVVPQLQYRMYGSLINQMAQVAQNYDREFKQFKLFIIQNQILGSYLLQQNRAFAERELQMESFHAAVISQRREELDNTFAKMDRLSGQMEEEDRAMEQARKEMEEGLKQFQNEQVARAVFAVLKSVAQIGLAFLTAGATAPGAVASAGQAVSIAGQAAQGLRRVVEILEQLEAVMEVVAAVKDLVDSLEQVGQIVDAPVMPELPSEADWSIFVNEVEAVAEGMPTEVSEVPVWKAKCKNVAALGREMSITAVQMSELQYDIWVQGMMRDMARSQADRLAAIQPADLTNYLEMAIQMDMRTTRMLLGLLNILRIQNAALRYEYLLMPTELTTWPLGMDTVANLLITHESAALSGLAQLGPSSDFSSRHVVKGIPVSLLLDGGDWEFEIPVQAGMSSFPSSWSRVRIRHLEMHFVKEASGGGEIIHQPTTQTGTIYILLQGSTVFHDRRREEVMTFQAAVPLNYHYAYRLDTGEATLTNEPSEQFANKFMQMTPFTRWRLRLSASAKENAGLAFPTATALDSTTQIVITFHVTAIRQIDWRQEEE

SEQ ID NO: 594 - protein, 866 aa, synthetic construct
  REGION 1..866: note = PtIP-83 polypeptide variant
MALVDYGKLFEDLNQISMGVLDRVEFSEVMVIHRMYVRLADLNVGQLEGAEKVKRLYVFADVVELPVVEWRWPPQIPGSVTVIILCRLLQWPTDGRQSDTELHLTFMKLHAIQREENRWEITAADGMNWGVYIHAEEVQVGVLTMSWSSVLRVSALRSVITSGFRAVSVFEVPGSVRSTLGATLRPDHALYSTTMQATPNASHISAFNLRIVSPSAYRVCPLQNDTDTYLGIPADVAAVLPVDVVTDPNILLGMQTTVHIAELVKACHPSPDVVSAVGEHLNWLNKLLLPLKESTQLQGSESYKECLALLGRVHAAMKMVRIGLVVPQLQYRMYGSLINQMAQVAQNYDREFKQFKLFIIQNQILGSYLLQQNKAFADREVQMESFHAAVISQRREELDNTFAKMDRLSGQMEAESSAMEQAKKEMDEGLRQFQNEQVARAVFAVLKSVAMIALAFVTAGATAPGAVASAGQAVSIAGQAAQGLRRVVEILEGLEAVMEVVAAVKDLVDSLEQVGQIVDAPVMPELPSEADWSIFVNEVEAVAEGMPTEVSEVPAWRAKCKNVAALGREMCITAVQISQLQYDIWVQGMMRDMARSQADRLAAIQPADLTNYLEMATQMDMRTTRMLLGLLNILRIQNAALRYEYLLMPTELTTWPLGMDTVGDLLIAQENAALIGLMQLGPPSDFTSRHVVKDIPVNLLLDGEDWEFEIPVQAGMSSFPSSWSRVRIRHLEMHFVQEASGGGEIIHQPTTQTGTVYILLQGSTIFHDRRRDQVLPFQAAAPLNYHYAYRLDTGEATLTNEPSEQFANTFMQMTPFTHWRLRLSASAAENKGLAFPTATAPDSTTEIAITFHVTAIRQIDWRHDEE

SEQ ID NO: 595 - protein, 682 aa, synthetic construct
  REGION 1..682: note = PtIP-83 polypeptide variant
MDYSTLYRDLNQISMPLDRVEFSEVMVIHRMYVRLADLNVGELPGAERVKRLYVLADVVTDPNILMGMQTSVHIAELVKACYPSPELVSAVGVHVNWLNEVLLRVVQKESQLQGTEAYNECLALLGRIQCVMKMGPFVSVVPQLQYRMYGSLIRQMAQVAQNYDQDFRQLKLFIAQNQILGSYLLQQNKAFADREVQMESFHSAVISQRRQELDDAIAKMDRLSLQMEEEDRAMEQARKEMEEGLKQFQNEQVARAVFAVLKSVAMIALAFVTAGATAPGAAASAAQAVSIAGQAAQGLRRVVEILEQLEAVMEVVAAVKDLVDSLEQVGQIVDAPVMPELPSEADWSIFVNEVEAVAEGMPTEVSEVPVWRAKCKNVAALGREMCITAVQMSELQYDIWVQGMMRDIAQSHADRLAAIQPANLTNYLEMATQMDMRTTRMLLGLLNILRIQNAALRYEYLLMPTELTTWPLGMDTVGDLLIAQENAALIGLMQLGPSSDFTSRHVVKGIPVSLLLDGGDWEFEIPVQGGMSSFPSSWSRVRIRHLEMHFVKEASGIGGEIIHQPTTQTGTVYILLQGSTVFHDRRREEVMTFQAAVPLNYHYAYRLDTGDSTLTNEPSEQFANTFMQMTPFTRWRLRLSASAAENKGLAFPTATAPDSTTEIAITFHVTAIRQIDWRHDEE

SEQ ID NO: 596 - protein, 855 aa, synthetic construct
  REGION 1..855: note = PtIP-83 polypeptide variant
MALVDYGKLFEDLNQISMGVLDRVEFSEVMVIHRMYVRLADLNVGQLEGAEKVKRLYVFADVVELPVVEWRWPPQIPGSVTVIILCRLLQFPTDGSFAAWLELPFMELHTLIEQYRSEIKAADDAKWGTYVHAEEVQLSPLFNGWPYLVVEAQRCIITAAMHNTFNRPGWVRSITQFTTDQSGRVDTTLLARTEFGHIDLPLETDSPTAFSVSHRQSTNLPVEYTGIPVEVVTDPNILMGMQTTVHIAELVKACHPSPDVVSAVGEHLNWLNEVLLRVVQKESQLQGTEAYNECLALLGRIQCVMKMGPFVSVVPQLQYRMYGSLINQMAQVAQNYDQDFRQLKLFIAQNQILGSYLLQQNRAFADREVQMESFHSAVISQRRQELDDAIAKMDRLSLQMEEEDRAMEQAKKEMDEGLRQFQNRQVANALFAVLSAVAQIGLAFLTAGATAPGAVASAGQAVSIAGQAAQGLRRVVEILEGLEAVMEVVAAVKDLVDSLEQVGQIVDAPVMPELPSEADWSIFVNEVEAVAEGMPTEVSEVPVWKAKCKNVAALGREMSITAEQMSELQYDIWVQGLMRDMARSQADRLAAIQPADLTNYLEMATQMDMRTTRMLLGLLNIMRIQNAALRYEYLLMPTELTTWPLGMDTVGDLLIAQENAALIGLMQLGPPSDFTSRHVVKGIPVSLLLDGGDWEFEIPVQAGMSSFPSSWTRVRIRHLEMHFVKEASGIGGEIIHQPTTQTGTVYILLQGSTIFHDRRRDQVLPFQAAAPLNYHYAYRLDTGEATLTNEPSEQFANTFMQMTPFTRWRLRLSASAKENAGLAFPTATALDSTTQIVITFHVTAIRQIDWRHDEE

SEQ ID NO: 597 - protein, 853 aa, synthetic construct
  REGION 1..853: note = PtIP-83 polypeptide variant
MDYSTLYRDLNQISMPLDRVEFSEVMVIHRMYVRLADLNVGQLEGAEKVKRLYVLADVVELATFAHPQLLNTRMPGSVTVIILCRLLQFPTDGSFAAWLELPFMELHTLIGQYRSEIKAADDAKWGTYVHAEEVQLSPLFNGWPYLVVEAQRCIITAAMHNTFNRPGWVRSITQFTTDQSGRVDTTLLARTEFGHIDLPLETDSPTAFSVSHRQSTNLPVEYTGIPVEVVTDPNILMGMQTSVHIAELVKACYPSPDVVSAVGVHVNWLNEVLLRVVQKESQLQGTEAYNECLALLGRIQCVMKMGPFVSVVPQLQYRMYGSLIRQMAQVAQNYDQDFRQLKLFIAQNQILGSYLLQQNKAFADREVQMESFHAAVISQRRQELDDAIAKMDRLSLQMEEEDRAMEQAKKEMDEGLRQFQNRQVANALFAVLSAVAQIGLAFLTAGATAPGAVASAGQAVSIAGQAAQGLRRVVEILEGLEAVMEVVAAVKDLVDSLEQVGQIVDAPVMPELPSEADWSIFVNEVEAVAEGMPTEVSEVPVWRAKCKNVAALGREMCITAEQISQLQYDIWVQGLLRDIAQSHADRLAAIQPANLTNYLEMAIQMDMRTTRILIGLLNIMRIQNAALMYEYLLTPTQLTAWPLRMDTVANLLITHESAALSGLAQLGPPSDFTSRHVVKGIPVSLLLDGGDWEFEIPVQGGMSSFPSSWTRVRIRHLEMHFVQEASGIGGEIIHQPTTQTGTIYILLQGSTVFHDRRREEVMTFQAAVPLNYHYAYRLDTGDSTLTNEPSEQFANTFMQVTPFTRWRLRLSASAKENAGLAFPTATALDSTTQIVITFHVTAIRQIDWRHDEE

SEQ ID NO: 598 - protein, 855 aa, synthetic construct
  REGION 1..855: note = PtIP-83 polypeptide variant
MALVDYGKLFEDLNQISMPLDRVEFSEVMVIHRMYVRLADLNVGQLEGAERVKRLYVLADVVELATFAHPQLLNTRMPGSVTVIILCRLLQFPTDGSFAAWLELPFMELHTLIEQYRSEIKAADDAKWGTYVHAEEVQLSPLFNGWPYLVVEAQRCIITAAMHNTFNRPGWVRSITQFTTDQSGRVDTTLLARTEFGHIDLPLETDSPTAFSVSHRQSTNLPVEYTGIPVEVVTDPNILMGMQTSVHIAELVKACYPSPELVSAVGVHVNWLNEVLLRVVQKESQLQGTEAYNECLALLGRIQCVMKMGPFVSVVPQLQYRMYGSLINQMAQVAQNYDQDFRQLKLFIAQNQILGSYLLQQNRAFAERELQMESFHAAVISQRREELDNTFAKMDRLSLQMEEEDRAMEQAKREMDEGLRQFQNEQVARAVFAVLKSVAMIALAFVTAGATAPGAVASAGQAVSIAGQAAQGLRRVVEILEGLEAVMEVVAAIKHLVDALDQVSQIVDAPVMPELPSEADWSIFVNEVEAVAEGMPTEVSEVPVWRAKCKNVAALGREMCITAEQISQLQYDIWVQGLLRDIAQSHADRLAAIQPADLTNYLEMATQMDMRTTRMLLGLLNILRIQNAALRYEYLLMPTELTTWPLGMDTVGDLLITHESAALSGLAQLGPPSDFTSRHVVKDIPVNLLLDGEDWEFEIPVQAGMSSFPSSWTRVRIRHLEMHFVQEASGGGEIIHQPTTQTGTVYILLQGSTVFHDRRREEVMTFQAAVPLNYHYAYRLDTGDSTLTNEPSEQFANKFMQMTPFTHWRLRLSASAAENKGLAFPTATAPDSTTEIAITFHVTAIRQIDWRHDEE

SEQ ID NO: 599 - protein, 855 aa, synthetic construct
  REGION 1..855: note = PtIP-83 polypeptide variant
MALVDYGKLFEDLNQISMPLDRVEFSEEMVIHRMYVRLADLNVGQLEGAEKVKRLYVLADVVELATFAHPQLLNTRMPGSVTVIILCRLLQFPTDGSFAAWLELPFMELHTLIEQYRSEIKAADDAKWGTYVHAEEVQLSPLFNGWPYLVVEAQRCIITAAMHNTFNRPGWVRSITQFTTDQSGRVDTTLLARTEFGHIDLPLETDSPTAFSVSHRQSTNLPVEYTGIPVEVVTDPNILMGMQTSVHIAELVKACYPSPELVSAVGVHVNWLNEVLLRVVQKESQLQGTEAYNECLALLGRIQCVMKMGPFVSVVPQLQYRMYGSLIRQMAQVAQNYDREFKQFKLFIIQNQILGSYLLQQNRAFAERELQMESFHSAVISQRRQELDDAIAKMDRLSLQMEAESSAMEQAKKEMDEGLRQFQNRQVANALFAVLSAVAQIGLAFLTAGATAPGAVASAGQAVSIAGQAAQGLRRVVEILEQLEAVMEVVAAVKDLVDSLEQVGQIVDAPVMPELPSEADWSIFVNEIEAVAEGMPTEVSEVPAWKAKCKNVAALGREMCITAEQISQLQYDIWVQGLLRDIAQSHADRLAAIQPANLTNYLEMAIQMDMRTTRMLPGLLNILRIQNAALRYEYLLMPTELTTWPLGMDTVGDLLIAQENAALIGLMQLGPSSDFTSRHVVKGIPVSLLLDGGDWEFEIPVQAGMSSFPSSWSRVRIRHLEMHFVQEASGGGEIIHQPATQTGTIYILLQGSTVFHDRRRDQVLPFQAAAPPNYHYAYRLDTGDSTLTNEPSEQFANTFMQMTPFTHWRLRLSASAAENKGLAFPTATALDSTTEIAITFHVTAIRQIDWRHDEE

SEQ ID NO: 600 - protein, 856 aa, synthetic construct
  REGION 1..856: note = PtIP-83 polypeptide variant
MALVDYGKLFEDLNQISMGVLDRVESSEVMVIHRMYVRLADLNVGELPGAERVKRLYVLADVVELATFAHPQLLNTRMPGSVTVIILCRLLQFPTDGSFAAWLELPFMELHTLIEQYRSEIKAADDAKWGTYVHAEEVQLSPLFNGWPYLVVEAQRCIITAAMHNTFNRPGWVRSITQFTTDQSGRVDTTLLARTEFGHIDLPLETDSPTAFSVSHRQSTNLPVEYTGIPVEVVTDPNILMGMQTSVHIAELVKACYPSPELVSAVGVHVNWLNEVLLRVVQKESQLQGTEAYNECLALLGRFQCVMKMGPFVSVVPQLQYRMYGSLINQMAQVAQNYDQDFRQLKLFIAQNQILGSYLLQQNRAFAERELQMESFHAAVISQRRQELDDAIAKMDRLSLQMEAESSAMEQAKKEMDEGLRQFQNRQVANALFAVLSAVAQIALAFVTAGATAPGAVASAGQAVSIAGQAAQGLRRVVEILEGLEAVMEVVAAIKHLVDALDQVSQIVDAPPMPDMPSEADWSIFVNEIEAVAEGMPTEVSEVPVWRAKCKNVAALGREMCITAVQMSELQYDIWVQGMMRDMARSQADRLAAIQPADLTNYLEMAIQMDMRTTRMLLGLLNILRIQNAALRYEYLLMPTELTTWPLGMDTVGDLLIAQENAALIGLMQLGPSSDFTSRHVVKDIPVNLLLDGEDWEFEIPVQGGMSSFPSSWTRVRIRHLEMHFVQEASGGGEIIHQPATQTGTIYILLQGSTVFHDRRREEVMTFQAAVPLNYHYAYRLDTGEATLTDEPSEQFANKFMQMTPFTRWRLRLSASAAENKGLAFPTATAPDSTTEIAITFHVTAIRQIDWRQEEE

SEQ ID NO: 601 - protein, 853 aa, synthetic construct
  REGION 1..853: note = PtIP-83 polypeptide variant
MDYSTLYRDLNQISMPLDRVEFSEVMEIHRMYVRLADLNVGQLEGAERVKRLYVFADVVELATFAHPQLLNTRMPGSATVIILCRLLQFPTDGSFAAWLELPFMELHTLIEQYRSEIKAADDAKWGTYVHAEEVQLSPLFNGWPYLVVEAQRCIITAAMHNTFNRPGWVRSITQFTTDQSGRVDTTLLARTEFGHIDLPLETDSPTAFSVSHRQSTNLPVEYTGIPVEVVTDPNILLGMQTTVHIAELVKACHPSPDVVSAVGVHVNWLNEVLLRVVQKESQLQGTEAYNECLALLGRIQCVMKMGPFVSVVPQLQYRMYGSLIRQMAQVAQNYDQDFRQLKLFIAQNQILGSYLLQQNKAFADREVQMESFHAAVISQRREELDNTFAKMDRLSGQMEEEDRAMEQARKEMEEGLRQFQNRQVANALFAVLSAVAQIGLAFLTAGATAPGAVASAGQAVSIAGQAAQGLRRVVEILEGLEAVMEVVAAIKHLVDALDQVSQIVDAPPMPDMPSEADWSIFVNEIEAVAEGMPTEVSEVPVWRAKCKNVAALGREMSITAVQMSELQYDIWVQGLLRDIAQSHADRLAAIQPANLTNYLEMATQMDMRTTRMLLGLLNIMRIQNAALMYEYLLTPTQLTAWPLRMDTVANLLITHESAALSGLAQLGPPSDFTSRHVVKGIPVSLLLDGGDWEFEIPVQAGMSSFPSSWSRVRIRHLEMHFVKEASGIGGEIIHQPATQTGTIYILLQGSTVFHDRRRDQVLPFQAAAPLNYHYAYRLDTGEATLTNEPSEQFANKFMQMTPFTRWRLRLSASAAENEGLAFPTATAPDSTTEIAITFHVTAIRQIDWRQEEE

SEQ ID NO: 602 - protein, 855 aa, synthetic construct
  REGION 1..855: note = PtIP-83 polypeptide variant
MALVDYGKLFEDLNQISMPLDRVEFSEVMVIHRMYVRLADLNVGELPGAERVKRLYVLADVVELATFAHPQLLNTRMPGSVTVIILCRLLQFPTDGSFAAWLELPFMELHTLIEQYRSEIKAADDAKWGTYVHAEEVQLSPLFNGWPYLVVEAQRCIITAAMHNTFNRPGWVRSITQFTTDQSGRVDTTLLARTEFGHIDLPLETDSPTAFSVSHRQSTNLPVEYTGIPVEVVTDPNILMGMQTSVHIAELVKACYPSPDVVSAVGVHVNWLNEVLLRVVQKESQLQGTEAYNECLALLGRIQCVMKMGPFVSVVPQLQYRMYGSLIRQMAQVAQNYDQDFRQLKLFIAQNQILGSYLLQQNRAFADREVQMESFHAAVISQRREELDNTFAKMDRLSLQMEEEDRAMEQARKEMEEGLKQFQNEQVARAVFAVLKSVAMIALAFVTAGATAPGAVASAGQAVSIAGQAAQGLRRVVEILEGLEAVMEVVAAIKHLVDALDQVSQIVDAPPMPDMPSEADWSIFVNEIEAVAEGMPTEVSEVPVWKAKCKNVAALGREMCITAEQISQLQYDIWVQGMMRDMARSQADRLAAIQPADLTNYLEMATQMDMRTTRILIGLLNIMRIQNAALRYEYLLMPTELTTWPLGMDTVGDLLIAQENAALSGLAQLGPPSDFTSRHVVKDIPVSLLLDGGDWEFEIPVQGGMSSFPSSWTRVRIRHLEMHFVQEASGGGEIIHQPATQTGTIYILLQGSTVFHDRRREEVMTFQAAVPLNYHYAYRLDTGDSTLTNEPSEQFANTFMQMTPFTHWRLRLSASAKENAGLAFPTATALDSTTEIVITFHVTAIRQIDWRHEEE

SEQ ID NO: 603 - protein, 852 aa, synthetic construct
  REGION 1..852: note = PtIP-83 polypeptide variant
MDYSTLYRDLNQISMPLDRVEFSEVMVIHRMYVRLADLNVGQLEGAEKVKRLYVLADVVELATFAHPQLLNTRMPGSVTVIILCRLLQFPTDGSFAAWLELPFMELHTLIEQYRSEIKAADDAKWGTYVHAEEVQLSPLFNGWPYLVVEAQRCIITAAMHNTFNRPGWVRSITQFTTDQSGRVDTTLLARTEFGHIDLPLETDSPTAFSVSHRQSTNLPVEYTGIPVEVVTDPNILMGMQTTVHIAELVKACHPSPDVVSAVGVHLNWLNEVLLRVVQKESQLQGTEAYNECLALLGRIQCVMKMGPFVSVVPQLQYRMYGSLIRQMAQVAQNYDQDFRQLKLFIAQNQILGSYLLQQNRAFADREVQMESFHSAVISQRREELDNTFAKMDRLSGQMEAESSAMEQAKKEMEEGLRQFQNRQVANALFAVLSAVAQIGLAFLTAGATAPGAVASAGQAVSIAGQAAQGLRRVVEILEGLEAVMEVVAAVKDLVDSLEQVGQIVDAPVMPELPSEADWSIFVNEVEAVAEGMPTEVSEVPVWKAKCKNVAALGREMCITAVQMSELQYDIWVQGMMRDMARSQADRLAAIQPADLTNYLEMATQMDMRTTRILIGLLNIMRIQNAALMYEYLLTPTQLTAWPLRMDTVANLLITHESAALSGLAQLGPPSDFTSRHVVKDIPVNLLLDGGDWEFEIPVQGGMSSFPSSWTRVRIRHLEMHFVQEASGGGEIIHQPATQTGTVYILLQGSTIFHDRRREEVMTFQAAVPLNYHYAYRLDTGDSTLTNEPSEQFANKFMQMTPFTRWRLRLSASAKENAGLAFPTATALDSTTEIAITFHVTAIRQIDWRQEEE

SEQ ID NO: 604 - protein, 852 aa, synthetic construct
  REGION 1..852: note = PtIP-83 polypeptide variant
MDYSTLYRDLNQISMPLDRVEFSEVMVIHRMYVRLADLNVGQLEGAEKVKRLYVLADVVELATFAHPQLLNTRMPGSVTVIILCRLLQFPTDGSFAAWLELPFMELHTLIEQYRSEIKAADDAKWGTYVHAEEVQLSPLFNGWPYLVVEAQRCIITAAMHNTFNRPGWVRSITQFTTDQSGRVDTTLLARTEFGHIDLPLETDSPTAFSVSHRQSTNLPVEYTGIPVEVVTDPNILMGMQTTVHIAELVKACHPSPDVVSAVGVHVNWLNEVLLRVVQKESQLQGTEAYNECLALLGRIQCVMKMGPFVSVVPQLQYRMYGSLIRQMAQVAQNYDQDFRQLKLFIAQNQILGSYLLQQNRAFAERELQMESFHAAVISQRREELDNTFAKMDRLSGQMEAESSAMEQAKKEMDEGLRQFQNRQVANALFAVLSAVAQIGLAFLTAGATAPGAVASAGQAVSIAGQAAQGLRRVVEILEGLEAVMEVVAAIKHLVDALDQVSQIVDAPPMPDMPSEADWSIFVNEIEAVAEGMPTEVSEVPAWKAKCKNVAALGREMCITAEQISQLQYDIWVQGLLRDMARSQADRLAAIQPADLTNYLEMATQMDMRTTRMLLGLLNIMRIQNAALMYEYLLMPTQLTTWPLGMDTVGDLLIAQENAALSGLAQLGPPSDFTSRHVVKGIPVSLLLDGGDWEFEIPVQGGMSSFPSSWTRVRIRHLEMHFVQEASGGGEIIHQPTTQTGTIYILLQGSTVFHDRRRDQVLPFQAAAPLNYHYAYRLDTGEATLTNEPSEQFANKFMQMTPFTRWRLRLSASAKENAGLAFPTATAPDSTTEIAITFHVTAIRQIDWRQEEE

SEQ ID NO: 605 - protein, 852 aa, synthetic construct
  REGION 1..852: note = PtIP-83 polypeptide variant
MDYSTLYRDLNQISMPLDRVEFSEVMVIHRMYVRLADLNVGELPGAERVKRLYVLADVVELATFAHPQLLNTRMPGSVTVIILCRLLQFPTDGSFAAWLELPFLELHTLIEQYRSEIKAADDAKWGTYVHAEEVQLSPLFNGWPYLVVEAQRCIITAAMHNTFNRPGWVRSITQFTTDQSGRVDTTLLARTEFGHIDLPLETDSPTAFSVSHRQSTNLPVEYTGIPVEVVTDPNILMGMQTSVHIAELVKACHPSPDVVSAVGVHVNWLNEVLLRVVQKESQLQGTEAYNECLALLGRIQCVMKMGPFVSVVPQLQYRMYGSLIRQMAQVAQNYDREFKQFKLFIIQNQILGSYLLQQNRAFADREVQMESFHSAVISQRREELDNTFAKMDRLSGQMEAESSAMEQAKKEMDEGLRQFQNRQVANALFAVLSAVAQIGLAFLTAGATAPGAVASAGQAVSIAGQAAQALRRVVEILEGLEAVMEVVAAIKHLVDSLEQVGQIVDAPVMPELPSEADWSIFVNEVEAVAEGMPTEVSEVPAWKAKCKNVAALGREMCITAEQMSELQYDIWVQGLLRDMARSQADRLAAIQPADLTNYLEMAIQMDMRTTRILIGLLNILRIQNAALRYEYLLTPTELTTWPLGMDTVGDLLITHESAALSGLAQLGPPSDFTSRHVVKGIPVSLLLDGGDWEFEIPVQGGMSSFPSSWTRVRIRHLEMHFVKEASGGGEIIHQPTTQTGTIYILLQGSTVFHDRRREEVMTFQAAVPLNYHYAYRLDTGEATLTNEPSEQFANKFMQMTPFTHWRLRLSASAAENKGLAFPTATAPDSTTEIAITFHVTAIRQIDWRQEEE

SEQ ID NO: 606 - protein, 856 aa, synthetic construct
  REGION 1..856: note = PtIP-83 polypeptide variant
MALVDYGKLFEDLNQISMGVLDRVEFSEVMVIHRMYLRLSDLNVGELPGAERVKRLYVLADVVELATFAHPQLLNTRMPGSVTVIILCRLLQFPTDGSFAAWLELPFMELHTLIEQYRSEIKAADDAKWGTYVHAEEVQLSPLFNGWPYLVVEAQRCIITAAMHNTFNRPGWVRSITQFTTDQSGRVDTTLLARTEFGHIDLPLETDSPTAFSVSHRQSTNLPVEYTGIPVEVVTDPNILMGMQTSVHIAELVKACYPSPDVVSAVGEHLNWLNEVLLRVVQKESQLQGTEAYNECLALLGRIQCVMKMVRIGLVVPQLQYRMYGSLIRQMAQVAQNYDQDFRQLKLFIAQNQILGSYLLQQNKAFAERELQMESFHAAVISQRREELDNTFAKMDRLSGQMEAESSAMEQAKKEMDEGLRQFQNEQVARAVFAVLKSVAMIALAFVTAGATAPGAVASAGQAVNIAGQAAQALRRVVEILEGLEAVMEVVAAVKDLVDSLEQVGQIVDAPVMPELPSEADWSIFVNEIEAVAEGMPAEVSEVPAWKAKCKNVAALGREMCITAVQMSELQYDIWVQGMMRDMARSQADRLAAIQPADLTNYLEMATQMDMRTTRMLLGLLNILRIQNAALRYEYLLMPTELTTWPLGMDTVGDLLIAQENAALIGLMQLGPSSDFTSRHVVKGIPVSLLLDGGDWEFEIPVQGGMSSFPSSWSRVRIRHLEMHFVQEASGGGEIIHQPATQTGTIYILLQGSTVFHDRRREEVMTFQAAVPLNYHYAYRLDTGEATLTNEPSEQFANTFMQMTPFTHWRLRLSASAKENAGLAFPTATALDSTTQIVITFHVTAIRQIDWRQEEE

SEQ ID NO: 607 - protein, 857 aa, synthetic construct
  REGION 1..857: note = PtIP-83 polypeptide variant
MALVDYGKLFEDLNQISMGVLDRVEFSEVMVIHRMYVRLADLNVGELPGAERVKRLYVLADVVELATFAHPQLLNTRMPGSVTVIILCRLLQFPTDGSFAAWLELPFMELHTLIEQYRSEIKAADDAKWGTYVHAEEVQLSPLFNGWPYLVVEAQRCIITAAMHNTFNRPGWVRSITQFTTDQSGRVDTTLLARTEFGHIDLPLETDSPTAFSVSHRQSTNLPVEYTGIPVEVVTDPNILMGMQTSVHIAELVKACYPSPELVSAVGVHVNWLNEVLLRVVQKESQLQGTEAYNECLALLGRIQCVMKMGPFVSVVPQLQYRMYGSLIRQMAQVAQNYDQDFRQLKLFIAQNQILGSYLLQQNRAFAERELQMESFHAAVISQRREELDNTFAKMDRLSGQMEAESSAMEQAKREMDEGLRQFQNRQVANALFAVLSAVAQIGLAFVTAGATAPGAVASAGQAVSIAGQAAQGLRRVVEILEQLEAVMEVVAAVKDLVDSLEQVGQIVDAPVMPELPSEADWSIFVNEVEAVAEGMPTEVSEVPVWRAKCKNVAALGREMSITAVQISQLQYDIWVQGLLRDIAQSHADRLAAIQPANLTNYLEMAIQMDMRTTRILIGLLNIMRIQNAALMYEYLLTPTQLTAWPLRMDTVANLLITHESAALSGLAQLGPPSDFTSRHVVKGIPVSLLLDGGDWEFEIPVQGGMSSFPSSWTRVRIRHLEMHFVQEASGIGGEIIHQPTTQTGTIYILLQGSTVFHDRRREEVMTFQAAVPLNYHYAYRLDTGEATLTNEPSEQFANTFMQMTPFTHWRLRLSASAAENKGLAFPTATAPDSTTEIAITFHVTAIRQIDWRHDEE

SEQ ID NO: 608 - DNA, 60 bp, synthetic construct
  misc_feature 1..60: note = cDNA cloning primer
  source 1..60: mol_type = other DNA
cgaaatctctcatctaagaggctggatcctaggatggattacagcacgctttacagggac

SEQ ID NO: 609 - DNA, 60 bp, synthetic construct
  misc_feature 1..60: note = cDNA cloning primer
  source 1..60: mol_type = other DNA
ttaagttggccaatccagaagatggacaagtctagactactcctcctcttgccgccagtc

SEQ ID NO: 610 - DNA, 60 bp, synthetic construct; identical to SEQ ID NO: 608
  misc_feature 1..60: note = cDNA cloning primer
  source 1..60: mol_type = other DNA

SEQ ID NO: 611 - DNA, 23 bp, synthetic construct
  misc_feature 1..23: note = cDNA cloning primer
  source 1..23: mol_type = other DNA
caaggattgcattgctaggaagg

SEQ ID NO: 612 - DNA, 60 bp, synthetic construct; identical to SEQ ID NO: 609
  misc_feature 1..60: note = cDNA cloning primer
  source 1..60: mol_type = other DNA

SEQ ID NO: 613 - DNA, 23 bp, synthetic construct
  misc_feature 1..23: note = cDNA cloning primer
  source 1..23: mol_type = other DNA
ccttcctagcaatgcaatccttg

SEQ ID NO: 614 - DNA, 60 bp, synthetic construct; identical to SEQ ID NO: 608
  misc_feature 1..60: note = cDNA cloning primer
  source 1..60: mol_type = other DNA

SEQ ID NO: 615 - DNA, 60 bp, synthetic construct
  misc_feature 1..60: note = cDNA cloning primer
  source 1..60: mol_type = other DNA
aagttggccaatccagaagatggacaagtctagactactcctcctctttctcctcctgcc

SEQ ID NO: 616 - DNA, 59 bp, synthetic construct
  misc_feature 1..59: note = cDNA cloning primer
  source 1..59: mol_type = other DNA
cgaaatctctcatctaagaggctggatcctaggatggccagtgtactggattacagcac

SEQ ID NO: 617 - DNA, 56 bp, synthetic construct
  misc_feature 1..56: note = cDNA cloning primer
  source 1..56: mol_type = other DNA
ttaagttggccaatccagaagatggacaagtctagactactcctcctcgtgccgcc

SEQ ID NO: 618 - DNA, 60 bp, synthetic construct
  misc_feature 1..60: note = cDNA cloning primer
  source 1..60: mol_type = other DNA
gaaatctctcatctaagaggctggatcctaggatggattacagcactctttacagggatc

SEQ ID NO: 619 - DNA, 60 bp, synthetic construct; identical to SEQ ID NO: 609
  misc_feature 1..60: note = cDNA cloning primer
  source 1..60: mol_type = other DNA

SEQ ID NO: 620 - DNA, 60 bp, synthetic construct; identical to SEQ ID NO: 608
  misc_feature 1..60: note = cDNA cloning primer
  source 1..60: mol_type = other DNA

SEQ ID NO: 621 - DNA, 55 bp, synthetic construct
  misc_feature 1..55: note = cDNA cloning primer
  source 1..55: mol_type = other DNA
gttggccaatccagaagatggacaagtctagattagagtggcttcgccagtgtcg

SEQ ID NO: 622 - DNA, 60 bp, synthetic construct; identical to SEQ ID NO: 608
  misc_feature 1..60: note = cDNA cloning primer
  source 1..60: mol_type = other DNA

SEQ ID NO: 623 - DNA, 60 bp, synthetic construct; identical to SEQ ID NO: 615
  misc_feature 1..60: note = cDNA cloning primer
  source 1..60: mol_type = other DNA

SEQ ID NO: 624 - DNA, 60 bp, synthetic construct; identical to SEQ ID NO: 608
  misc_feature 1..60: note = cDNA cloning primer
  source 1..60: mol_type = other DNA

SEQ ID NO: 625 - DNA, 60 bp, synthetic construct; identical to SEQ ID NO: 615
  misc_feature 1..60: note = cDNA cloning primer
  source 1..60: mol_type = other DNA

SEQ ID NO: 626 - DNA, 26 bp, synthetic construct
  misc_feature 1..26: note = cDNA cloning primer
  source 1..26: mol_type = other DNA
gcctttatcgactcctaattcacacc

SEQ ID NO: 627 - DNA, 22 bp, synthetic construct
  misc_feature 1..22: note = cDNA cloning primer
  source 1..22: mol_type = other DNA
ccacattgtgcattacgaccac

SEQ ID NO: 628 - DNA, 26 bp, synthetic construct
  misc_feature 1..26: note = cDNA cloning primer
  source 1..26: mol_type = other DNA
ccagtgatttgagttccttcattatg

SEQ ID NO: 629 - DNA, 24 bp, synthetic construct
  misc_feature 1..24: note = cDNA cloning primer
  source 1..24: mol_type = other DNA
gaacagtacattgactgcatgtgc

SEQ ID NO: 630 - DNA, 51 bp, synthetic construct; identical to SEQ ID NO: 162
  misc_feature 1..51: note = mutagenesis primer
  source 1..51: mol_type = other DNA

SEQ ID NO: 631 - DNA, 23 bp, synthetic construct
  misc_feature 1..23: note = mutagenesis primer
  source 1..23: mol_type = other DNA
gcagccacaacctccatcacagc

SEQ ID NO: 632 - DNA, 52 bp, synthetic construct; identical to SEQ ID NO: 163
  misc_feature 1..52: note = mutagenesis primer
  source 1..52: mol_type = other DNA

SEQ ID NO: 633 - DNA, 23 bp, synthetic construct
  misc_feature 1..23: note = mutagenesis primer
  source 1..23: mol_type = other DNA
gctgtgatggaggttgtggctgc

SEQ ID NO: 634 - DNA, 2601 bp, synthetic construct
  misc_feature 1..2601: note = PtIP-83 polypeptide variant encoding polynucleotide
  source 1..2601: mol_type = other DNA
atggctctcgtggattacggcaagcttttcgaggatctgaaccagataagcatgggtgtactggatcgggtagagttttcagaggtgatggtgatccacaggatgtatgtgaggctagctgatctgaatgtggggcagctcgagggagccgagaaagtgaagcggttgtatgtgtttgcggacgtggtggagctaccagtcgtggaatggcggtggccgccgcaaataccaggatcggtgacggtgatcatattgtgtcgtcttcttcaatggccaactgatgggaggcagtcggacaccgagctccacctgacattcatgaagttgcatgccatacaacgagaggaaaatcggtgggagataaccgcagcagatggcatgaactggggagtttacatacacgcagaggaagtacaggttggcgtgctgacaatgtcatggtcttcggtacttagagtttcggcacttcgctctgttataacctccggctttcgcgccgttagtgtgtttgaggtaccgggaagtgtaaggtccacccttggagctactttaaggcccgatcacgccttatatagtacaactatgcaagccacacccaacgcatcgcatattagtgcttttaaccttcgcatagtttccccgtcggcatatcgtgtttgtcctctccaaaatgacacagatacctacttaggtattccagcagacgtggcggcagttcttccagtagacgtggtgactgatcctaacatcttgctgggcatgcagacaacggtacacattgcggagctagtcaaggcatgtcatccgtcacccgatgttgtgagcgctgtaggggagcacctgaactggctcaacaaactcttactcccacttaaggaatcgactcagttgcaaggaagcgagtcgtacaaggagtgccttgcactcttgggtcgtgttcacgctgcgatgaagatggtgagaattggcttagtagtgccccagctgcaatatcgcatgtacaaagatctcattgatcgaatggtgcaagtggctcagagctacgaccaagacttcaagcagttgaagctgttcgtggaacaaaataagatacttgggagctatttgctagagcaaaacaaggcgtttgctgagaaggaaaaagacatggatgcttttcactcccaagtcattgatctcaggacttctgagcttgaaagcaccattgagagaatggatgacttaagcaaacaaatggaagaacaaaatgcagcaatggagcaagccaaagcggacatggacgcagggttgatagcgtatcaaaacaaacaagtcgcaaatgccgtctttgcggtcttgggggcgatcgccagtattggtctggcatttgcaactggcggggcaactgctcctggagccgtggcttccgcggggcaagctgtgagcatagcaggtcaggcggcgcaaggtctgcgaagggtggtggaaattctagagcagctggaggctgtgatggaggttgtggctgctgtgaaggacctcgtggattcattggaacaggtaggtcagattgtggacgcaccggtgatgccggaattgccctcagaggcggactggtccatttttgtgaacgaggtggaggccgtggcagagggcatgccaacggaagtctcggaggttccggtgtggagggccaagtgcaagaatgtggctgcactgggtcgggagatgagcatcacggcagtacagatgtcggagctgcagtatgacatctgggtgcaaggcatgatgcgggatatggctcgaagccaggcagacaggctggccgcaattcaacccgcggaccttaccaactatttggagatggctacccagatggatatgcggactacgaggatgctgctggggctcctcaacatattgcgcatccagaatgcggcgctcaggtacgagtatcttctaatgcccacggagctcacaacatggccactgggtatggataccgtgggtgacttgctcatcgcgcaggagaatgctgcactgataggattaatgcagctagggccctcatctgatttcacgagcaggcatgtggtgaaagacatacctgtgaacttgctgctcgatggcgaggattgggagtttgagattcctgtgcaagctggcatgtccagcttcccttccagctggtctcgcgtccgtattcggcacctggagatgcactttgtgaaggaggccagcggtattggtggtgagattatccaccagcctaccacccagactgggaccgtttacatccttctgcagggttccactatcttccatgaccgcagaagagaccaggtgttgccttttcaggccgctgctccgctcaactaccattacgcgtaccgcctcgacaccggcgactccactctcacaaacgaaccctctgaacagtttgccaacaagttcatgcagatgacacccttcacccgttggaggcttcgtctgtctgcgtccgcaaaagagaatgcaggattagcctttcccacggctacagcacttgactccactacccagattgtcatcactttccatgttacggccatcagacaaattgactggcggcacgacgaagag

SEQ ID NO: 635 - DNA, 2601 bp, synthetic construct
  misc_feature 1..2601: note = PtIP-83 polypeptide variant encoding polynucleotide
  source 1..2601: mol_type = other DNA
atggctctcgtggattacggcaagcttttcgaggatctgaaccagataagcatgggtgtactggatcgggtagagttttcagaggtgatggtgatccacaggatgtatgtgaggctagctgatctgaatgtggggcagctcgagggagccgagaaagtgaagcggttgtatgtgtttgcggacgtggtggagctaccagtcgtggaatggcggtggccgccgcaaataccaggatcggtgacggtgatcatattgtgtcgtcttcttcaatggccaactgatgggaggcagtcggacaccgagctccacctgacattcatgaagttgcatgccatacaacgagaggaaaatcggtgggagataaccgcagcagatggcatgaactggggagtttacatacacgcagaggaagtacaggttggcgtgctgacaatgtcatggtcttcggtacttagagtttcggcacttcgctctgttataacctccggctttcgcgccgttagtgtgtttgaggtaccgggaagtgtaaggtccacccttggagctactttaaggcccgatcacgccttatatagtacaactatgcaagccacacccaacgcatcgcatattagtgcttttaaccttcgcatagtttccccgtcggcatatcgtgtttgtcctctccaaaatgacacagatacctacttaggtattccagcagacgtggcggcagttcttccagtagacgtggtgactgatcctaacatcttgctgggcatgcagacaacggtacacattgcggagctagtcaaggcatgtcatccgtcacccgatgttgtgagcgctgtaggggagcacctgaactggctcaacaaactcttactcccacttaaggaatcgactcagttgcaaggaagcgagtcgtacaaggagtgccttgcactcttgggtcgtgttcacgctgcgatgaagatggtgagaattggcttagtagtgccccagctgcaatacagaatgtacggtagcctcatcaaccaaatggcccaagtagcacaaaactacgaccgagaattcaagcaattcaaattattcatcatccaaaatcaaatccttggcagctatttgctgcagcagaacagggcatttgctgagagggagctgcagatggagagctttcatgctgctgtcatttctcaaagaagggaggagttggacaatacattcgcaaagatggaccgattgagcgggcaaatggaggcagagagtagtgcaatggagcaagccaaaaaggaaatggacgaaggattgaggcagttccagaataggcaagttgcgaacgccctctttgccgttcttagcgctgtagctcagattgggcttgcattccttacggctggtgcaacggctcctggagccgtggcttccgcaggagcagctgttaccgcagctgggaaggcagctgagggattgaagaaagtggtagagattcttgaaggcttacaagcggtgatggaggtcgtcgctgtcataaaagagctggtacagtccttacaggagatagggcagcttgtggatgcccctgagatgccagatctgccgtcggatgcagaatgggagatttttgtgaatgaagtggaggcagtagcagagcagatgccaacagaggtgacagaggtgcctgcttggaaggccaagtgcaagaatgtggcagcactaggccgagaaatgagcactatggcggcgcacattgcagagttgcagttcgagatacaagtgcaagaaatgttgcgcgagatcgcgaagaaacaggcagataggctgtcgtccatcaagcccgcagacttgacgaactatttggagatggctacccagatggatatgcggactacgaggatgctgctggggctcctcaacatattgcgcatccagaatgcggcgctcaggtacgagtatcttctaatgcccacggagctcacaacatggccactgggtatggataccgtgggtgacttgctcatcgcgcaggagaatgctgcactgataggattaatgcagctagggccctcatctgatttcacgagcaggcatgtggtgaaagacatacctgtgaacttgctgctcgatggcgaggattgggagtttgagattcctgtgcaagctggcatgtccagcttcccttccagctggtctcgcgtccgtattcggcacctggagatgcactttgtgaaggaggccagcggtattggtggtgagattatccaccagcctaccacccagactgggaccgtttacatccttctgcagggttccactatcttccatgaccgcagaagagaccaggtgttgccttttcaggccgctgctccgctcaactaccattacgcgtaccgcctcgacaccggcgactccactctcacaaacgaaccctctgaacagtttgccaacaagttcatgcagatgacacccttcacccgttggaggcttcgtctgtctgcgtccgcaaaagagaatgcaggattagcctttcccacggctacagcacttgactccactacccagattgtcatcactttccatgttacggccatcagacaaattgactggcggcacgacgaagag

SEQ ID NO: 636 - DNA, 2601 bp, synthetic construct
  misc_feature 1..2601: note = PtIP-83 polypeptide variant encoding polynucleotide
  source 1..2601: mol_type = other DNA
atggctctcgtggattacggcaagcttttcgaggatctgaaccagataagcatgggtgtactggatcgggtagagttttcagaggtgatggtgatccacaggatgtatgtgaggctagctgatctgaatgtggggcagctcgagggagccgagaaagtgaagcggttgtatgtgtttgcggacgtggtggagctaccagtcgtggaatggcggtggccgccgcaaataccaggatcggtgacggtgatcatattgtgtcgtcttcttcaatggccaactgatgggaggcagtcggacaccgagctccacctgacattcatgaagttgcatgccatacaacgagaggaaaatcggtgggagataaccgcagcagatggcatgaactggggagtttacatacacgcagaggaagtacaggttggcgtgctgacaatgtcatggtcttcggtacttagagtttcggcacttcgctctgttataacctccggctttcgcgccgttagtgtgtttgaggtaccgggaagtgtaaggtccacccttggagctactttaaggcccgatcacgccttatatagtacaactatgcaagccacacccaacgcatcgcatattagtgcttttaaccttcgcatagtttccccgtcggcatatcgtgtttgtcctctccaaaatgacacagatacctacttaggtattccagcagacgtggcggcagttcttccagtagacgtggtgactgatcctaacatcttgctgggcatgcagacaacggtacacattgcggagctagtcaaggcatgtcatccgtcacccgatgttgtgagcgctgtaggggagcacctgaactggctcaacaaactcttactcccacttaaggaatcgactcagttgcaaggaagcgagtcgtacaaggagtgccttgcactcttgggtcgtgttcacgctgcgatgaagatggtgagaattggcttagtagtgccccagctgcaatacagaatgtacggtagcctcatcaaccaaatggcccaagtagcacaaaactacgaccgagaattcaagcaattcaaattattcatcatccaaaatcaaatccttggcagctatttgctgcagcagaacagggcatttgctgagagggagctgcagatggagagctttcatgctgctgtcatttctcaaagaagggaggagttggacaatacattcgcaaagatggaccgattgagcgggcaaatggaggcagagagtagtgcaatggagcaagccaaaaaggaaatggacgaaggattgaggcagttccagaataggcaagttgcgaacgccctctttgccgttcttagcgctgtagctcagattgggcttgcattccttacggctggtgcaacggctcctggagctgtggcgtcggcggggcaagctgtgagcatagcaggtcaggcggcgcaaggtctgcgaagggtggtggaaattctagagcagctggaggctgtgatggaggttgtggctgctgtgaaggacctcgtggattcattggaacaggtaggtcagattgtggacgcaccggtgatgccggaattgccctcagaggcggactggtccatttttgtgaacgaggtggaggccgtggcagagggcatgccaacggaagtctcggaggttccggtgtggagggccaagtgcaagaatgtggctgcactgggtcgggagatgagcatcacggcagtacagatgtcggagctgcagtatgacatctgggtgcaaggcatgatgcgggatatggctcgaagccaggcagacaggctggccgcaattcaacccgcagacttgacgaactacttggagatggtgtccgaaatggacatgcgcacaacgcgcatgctgttggagctgattcgagtgctgtacatccagaacgcagcattgcagtacgaatatctgcagacaccggcgccattgaatgcatggccagtgacgatgcaaacggtgtgggggttgcttgtgcaacaagagacggccgcaattaacgggctgctgcagatgggggcgccctcggactacacacaagagtatgcggtgagagatgttcctgtgaggttgttactagggggtggagactgggagtttgagattcctgtgcaagctggcatgtccagcttcccttccagctggtctcgcgtccgtattcggcacctggagatgcactttgtgaaggaggccagcggtattggtggtgagattatccaccagcctaccacccagactgggaccgtttacatccttctgcagggttccactatcttccatgaccgcagaagagaccaggtgttgccttttcaggccgctgctccgctcaactaccattacgcgtaccgcctcgacaccggcgactccactctcacaaacgaaccctctgaacagtttgccaacaagttcatgcagatgacacccttcacccgttggaggcttcgtctgtctgcgtccgcaaaagagaatgcaggattagcctttcccacggctacagcacttgactccactacccagattgtcatcactttccatgttacggccatcagacaaattgactggcggcacgacgaagag

SEQ ID NO: 637 - DNA, 2604 bp, synthetic construct
  misc_feature 1..2604: note = PtIP-83 polypeptide variant encoding polynucleotide
  source 1..2604: mol_type = other DNA
atggctctcgtggattacggcaagcttttcgaggatctgaaccagataagcatgggtgtactggatcgggtagagttttcagaggtgatggtgatccacaggatgtatgtgaggctagctgatctgaatgtggggcagctcgagggagccgagaaagtgaagcggttgtatgtgtttgcggacgtggtggagctaccagtcgtggaatggcggtggccgccgcaaataccaggatcggtgacggtgatcatattgtgtcgtcttcttcaatggccaactgatgggaggcagtcggacaccgagctccacctgacattcatgaagttgcatgccatacaacgagaggaaaatcggtgggagataaccgcagcagatggcatgaactggggagtttacatacacgcagaggaagtacaggttggcgtgctgacaatgtcatggtcttcggtacttagagtttcggcacttcgctctgttataacctccggctttcgcgccgttagtgtgtttgaggtaccgggaagtgtaaggtccacccttggagctactttaaggcccgatcacgccttatatagtacaactatgcaagccacacccaacgcatcgcatattagtgcttttaaccttcgcatagtttccccgtcggcatatcgtgtttgtcctctccaaaatgacacagatacctacttaggtattccagcagacgtggcggcagttcttccagtagacgtggtgactgatcctaacatcttgctgggcatgcagacaacggtacacattgcggagctagtcaaggcatgtcatccgtcacccgatgttgtgagcgctgtaggggagcacctgaactggctcaacaaactcttactcccacttaaggaatcgactcagttgcaaggaagcgagtcgtacaaggagtgccttgcactcttgggtcgtgttcacgctgcgatgaagatggtgagaattggcttagtagtgccccagctgcaatacagaatgtacggtagcctcatcaaccaaatggcccaagtagcacaaaactacgaccgagaattcaagcaattcaaattattcatcatccaaaatcaaatccttggcagctatttgctgcagcagaacagggcatttgctgagagggagctgcagatggagagctttcatgctgctgtcatttctcaaagaagggaggagttggacaatacattcgcaaagatggaccgattgagcgggcaaatggaggcagagagtagtgcaatggagcaagccaaaaaggaaatggacgaaggattgaggcagttccagaataggcaagttgcgaacgccctctttgccgttcttagcgctgtagctcagattgggcttgcattccttacggctggtgcaacggctcctggagctgtggcgtcggcggggcaagctgtgagcatagcaggtcaggcggcgcaaggtctgcgaagggtggtggaaattctagagcagctggaggctgtgatggaggttgtggctgctgtgaaggacctcgtggattcattggaacaggtaggtcagattgtggacgcaccggtgatgccggaattgccctcagaggcggactggtccatttttgtgaacgaggtggaggccgtggcagagggcatgccaacggaagtctcggaggttccggtgtggagggccaagtgcaagaatgtggctgcactgggtcgggagatgagcatcacggcagtacagatgtcggagctgcagtatgacatctgggtgcaaggcatgatgcgggatatggctcgaagccaggcagacaggctggccgcaattcaacccgcggaccttaccaactatttggagatggctacccagatggatatgcggactacgaggatgctgctggggctcctcaacatattgcgcatccagaatgcggcgctcaggtacgagtatcttctaatgcccacggagctcacaacatggccactgggtatggataccgtgggtgacttgctcatcgcgcaggagaatgctgcactgataggattaatgcagctagggccctcatctgatttcacgagcaggcatgtggtgaaagacatacctgtgaacttgctgctcgatggcgaggattgggagtttgagattcctgtgcaagctggcatgtccagcttcccttccagctggtctcgcgtccgtattcggcacctggagatgcactttgtgaaggaggccagcggtattggtggtgagattatccaccagcccgtcacaagcacgggggaagtgtacatgctgctgcagagttctcgcttcttcgaggatcgcgccaagcgtgagaacgagttcattagctacgagggcggcatgggccttcagtatcagtatgcctaccgcttggccacgggcgacgccaccgtcaccaacgtccccagcgaggagtatgccaatacttttatgcgcctcgcacccttcactcgttggcgcctccgcctttcggcctccgcgcccgagaacaagggcctcgcatttccaaccgccaccttggccgatgccaccacacgaatcaaaatcacctttcacgtctctgccattcgccgtataagcaccagagtcgccgta

SEQ ID NO: 638 - DNA, 2598 bp, synthetic construct
  misc_feature 1..2598: note = PtIP-83 polypeptide variant encoding polynucleotide
  source 1..2598: mol_type = other DNA
atggctctcgtggattacggcaagcttttcgaggatctgaaccagataagcatgggtgtactggatcgggtagagttttcagaggtgatggtgatccacaggatgtatgtgaggctagctgatctgaatgtggggcagctcgagggagccgagaaagtgaagcggttgtatgtgtttgcggacgtggtggagctaccagtcgtggaatggcggtggccgccgcaaataccaggatcggtgacggtgatcatattgtgtcgtcttcttcaatggccaactgatgggaggcagtcggacaccgagctccacctgacattcatgaagttgcatgccatacaacgagaggaaaatcggtgggagataaccgcagcagatggcatgaactggggagtttacatacacgcagaggaagtacaggttggcgtgctgacaatgtcatggtcttcggtacttagagtttcggcacttcgctctgttataacctccggctttcgcgccgttagtgtgtttgaggtaccgggaagtgtaaggtccacccttggagctactttaaggcccgatcacgccttatatagtacaactatgcaagccacacccaacgcatcgcatattagtgcttttaaccttcgcatagtttccccgtcggcatatcgtgtttgtcctctccaaaatgacacagatacctacttaggtattccagcagacgtggcggcagttcttccagtagacgtggtgactgatcctaacatcttgctgggcatgcagacaacggtacacattgcggagctagtcaaggcatgtcatccgtcacccgatgttgtgagcgctgtaggggagcacctgaactggctcaacaaactcttactcccacttaaggaatcgactcagttgcaaggaagcgagtcgtacaaggagtgccttgcactcttgggtcgtgttcacgctgcgatgaagatggtgagaattggcttagtagtgccccagctgcaatacagaatgtacggtagcctcatcaaccaaatggcccaagtagcacaaaactacgaccgagaattcaagcaattcaaattattcatcatccaaaatcaaatccttggcagctatttgctgcagcagaacagggcatttgctgagagggagctgcagatggagagctttcatgctgctgtcatttctcaaagaagggaggagttggacaatacattcgcaaagatggaccgattgagcgggcaaatggaggcagagagtagtgcaatggagcaagccaaaaaggaaatggacgaaggattgaggcagttccagaataggcaagttgcgaacgccctctttgccgttcttagcgctgtagctcagattgggcttgcattccttacggctggtgcaacggctcctggagctgtggcgtcggcggggcaagctgtgagcatagcaggtcaggcggcgcaaggtctgcgaagggtggtggaaattctagagcagctggaggctgtgatggaggttgtggctgctgtgaaggacctcgtggattcattggaacaggtaggtcagattgtggacgcaccggtgatgccggaattgccctcagaggcggactggtccatttttgtgaacgaggtggaggccgtggcagagggcatgccaacggaagtctcggaggttccggtgtggagggccaagtgcaagaatgtggctgcactgggtcgggagatgagcatcacggcagtacagatgtcggagctgcagtatgacatctgggtgcaaggcatgatgcgggatatggctcgaagccaggcagacaggctggccgcaattcaacccgcggaccttaccaactatttggagatggctacccagatggatatgcggactacgaggatgctgctggggctcctcaacatattgcgcatccagaatgcggcgctcaggtacgagtatcttctaatgcccacggagctcacaacatggccactgggtatggataccgtgggtgacttgctcatcgcgcaggagaatgctgcactgataggattaatgcagctagggccctcatctgatttcacgagcaggcatgtggtgaaagacatacctgtgaacttgctgctcgatggcgaggattgggagtttgagattcctgtgcaagctggcatgtccagcttcccttccagctggtctcgcgtccgtattcggcacctggagatgcactttgtgaaggaggccagcggtattggtggtgagattatccaccagcctaccacccagactgggaccgtttacatccttctgcagggttccactatcttccatgaccgcagaagagaccaggtgttgccttttcaggccgctgctccgctcaactaccattacgcgtaccgcctcgacaccggcgactccactctcacaaacgaaccctctgaacagtttgccaacaagttcatgcagatgacacccttcactcgttggcgcctccgcctttcggcctccgcgcccgagaacaagggcctcgcatttccaaccgccaccttggccgatgccaccacacgaatcaaaatcacctttcacgtctctgccattcgccgtataagcaccagagtcgccgta

SEQ ID NO: 639 - DNA, 2601 bp, synthetic construct
  misc_feature 1..2601: note = PtIP-83 polypeptide variant encoding polynucleotide
  source 1..2601: mol_type = other DNA
atggctctcgtggattacggcaagcttttcgaggatctgaaccagataagcatgggtgtactggatcgggtagagttttcagaggtgatggtgatccacaggatgtatgtgaggctagctgatctgaatgtggggcagctcgagggagccgagaaagtgaagcggttgtatgtgtttgcggacgtggtggagctaccagtcgtggaatggcggtggccgccgcaaataccaggatcggtgacggtgatcatattgtgtcgtcttcttcaatggccaactgatgggaggcagtcggacaccgagctccacctgacattcatgaagttgcatgccatacaacgagaggaaaatcggtgggagataaccgcagcagatggcatgaactggggagtttacatacacgcagaggaagtacaggttggcgtgctgacaatgtcatggtcttcggtacttagagtttcggcacttcgctctgttataacctccggctttcgcgccgttagtgtgtttgaggtaccgggaagtgtaaggtccacccttggagctactttaaggcccgatcacgccttatatagtacaactatgcaagccacacccaacgcatcgcatattagtgcttttaaccttcgcatagtttccccgtcggcatatcgtgtttgtcctctccaaaatgacacagatacctacttaggtattccagcagacgtggcggcagttcttccagtagacgtggtgactgatcctaacatcttgctgggcatgcagacaacggtacacattgcggagctagtcaaggcatgtcatccgtcacccgatgttgtgagcgctgtaggggagcacctgaactggctcaacaaactcttactcccacttaaggaatcgactcagttgcaaggaagcgagtcgtacaaggagtgccttgcactcttgggtcgtgttcacgctgcgatgaagatggtgagaattggcttagtagtgccccagctgcaatatcgcatgtacaaagatctcattgatcgaatggtgcaagtggctcagagctacgaccaagacttcaagcagttgaagctgttcgtggaacaaaataagatacttgggagctatttgctagagcaaaacaaggcgtttgctgagaaggaaaaagacatggatgcttttcactcccaagtcattgatctcaggacttctgagcttgaaagcaccattgagagaatggatgacttaagcaaacaaatggaagaacaaaatgcagcaatggagcaagccaaagcggacatggacgcagggttgatagcgtatcaaaacaaacaagtcgcaaatgccgtctttgcggtcttgggggcgatcgccagtattggtctggcatttgcaactggcggggcaactgctcctggagccgtggcttccgcaggagcagctgttaccgcagctgggaaggcagctgagggattgaagaaagtggtagagattcttgaaggcttacaagcggtgatggaggtcgtcgctgtcataaaagagctggtacagtccttacaggagatagggcagcttgtggatgcccctgagatgccagatctgccgtcggatgcagaatgggagatttttgtgaatgaagtggaggcagtagcagagcagatgccaacagaggtgacagaggtgcctgcttggaaggccaagtgcaagaatgtggcagcactaggccgagaaatgagcactatggcggcgcacattgcagagttgcagttcgagatacaagtgcaagaaatgttgcgcgagatcgcgaagaaacaggcagataggctgtcgtccatcaagcccgcagacttgacgaactacttggagatggtgtccgaaatggacatgcgcacaacgcgcatgctgttggagctgattcgagtgctgtacatccagaacgcagcattgcagtacgaatatctgcagacaccggcgccattgaatgcatggccagtgacgatgcaaacggtgtgggggttgcttgtgcaacaagagacggccgcaattaacgggctgctgcagatgggggcgccctcggactacacacaagagtatgcggtgagagatgttcctgtgaggttgttactagggggtggagactgggagtttgagattcctgtgcaagctggcatgtccagcttcccttccagctggtctcgcgtccgtattcggcacctggagatgcactttgtgaaggaggccagcggtattggtggtgagattatccaccagcctaccacccagactgggaccgtttacatccttctgcagggttccactatcttccatgaccgcagaagagaccaggtgttgccttttcaggccgctgctccgctcaactaccattacgcgtaccgcctcgacaccggcgactccactctcacaaacgaaccctctgaacagtttgccaacaagttcatgcagatgacacccttcacccgttggaggcttcgtctgtctgcgtccgcaaaagagaatgcaggattagcctttcccacggctacagcacttgactccactacccagattgtcatcactttccatgttacggccatcagacaaattgactggcggcacgacgaagag

SEQ ID NO: 640 - protein, 867 aa, synthetic construct
  REGION 1..867: note = PtIP-83 polypeptide variant
MALVDYGKLFEDLNQISMGVLDRVEFSEVMVIHRMYVRLADLNVGQLEGAEKVKRLYVFADVVELPVVEWRWPPQIPGSVTVIILCRLLQWPTDGRQSDTELHLTFMKLHAIQREENRWEITAADGMNWGVYIHAEEVQVGVLTMSWSSVLRVSALRSVITSGFRAVSVFEVPGSVRSTLGATLRPDHALYSTTMQATPNASHISAFNLRIVSPSAYRVCPLQNDTDTYLGIPADVAAVLPVDVVTDPNILLGMQTTVHIAELVKACHPSPDVVSAVGEHLNWLNKLLLPLKESTQLQGSESYKECLALLGRVHAAMKMVRIGLVVPQLQYRMYKDLIDRMVQVAQSYDQDFKQLKLFVEQNKILGSYLLEQNKAFAEKEKDMDAFHSQVIDLRTSELESTIERMDDLSKQMEEQNAAMEQAKADMDAGLIAYQNKQVANAVFAVLGAIASIGLAFATGGATAPGAVASAGQAVSIAGQAAQGLRRVVEILEQLEAVMEVVAAVKDLVDSLEQVGQIVDAPVMPELPSEADWSIFVNEVEAVAEGMPTEVSEVPVWRAKCKNVAALGREMSITAVQMSELQYDIWVQGMMRDMARSQADRLAAIQPADLTNYLEMATQMDMRTTRMLLGLLNILRIQNAALRYEYLLMPTELTTWPLGMDTVGDLLIAQENAALIGLMQLGPSSDFTSRHVVKDIPVNLLLDGEDWEFEIPVQAGMSSFPSSWSRVRIRHLEMHFVKEASGIGGEIIHQPTTQTGTVYILLQGSTIFHDRRRDQVLPFQAAAPLNYHYAYRLDTGDSTLTNEPSEQFANKFMQMTPFTRWRLRLSASAKENAGLAFPTATALDSTTQIVITFHVTAIRQIDWRHDEE

SEQ ID NO: 641 - protein, 867 aa, synthetic construct
  REGION 1..867: note = PtIP-83 polypeptide variant
MALVDYGKLFEDLNQISMGVLDRVEFSEVMVIHRMYVRLADLNVGQLEGAEKVKRLYVFADVVELPVVEWRWPPQIPGSVTVIILCRLLQWPTDGRQSDTELHLTFMKLHAIQREENRWEITAADGMNWGVYIHAEEVQVGVLTMSWSSVLRVSALRSVITSGFRAVSVFEVPGSVRSTLGATLRPDHALYSTTMQATPNASHISAFNLRIVSPSAYRVCPLQNDTDTYLGIPADVAAVLPVDVVTDPNILLGMQTTVHIAELVKACHPSPDVVSAVGEHLNWLNKLLLPLKESTQLQGSESYKECLALLGRVHAAMKMVRIGLVVPQLQYRMYGSLINQMAQVAQNYDREFKQFKLFIIQNQILGSYLLQQNRAFAERELQMESFHAAVISQRREELDNTFAKMDRLSGQMEAESSAMEQAKKEMDEGLRQFQNRQVANALFAVLSAVAQIGLAFLTAGATAPGAVASAGAAVTAAGKAAEGLKKVVEILEGLQAVMEVVAVIKELVQSLQEIGQLVDAPEMPDLPSDAEWEIFVNEVEAVAEQMPTEVTEVPAWKAKCKNVAALGREMSTMAAHIAELQFEIQVQEMLREIAKKQADRLSSIKPADLTNYLEMATQMDMRTTRMLLGLLNILRIQNAALRYEYLLMPTELTTWPLGMDTVGDLLIAQENAALIGLMQLGPSSDFTSRHVVKDIPVNLLLDGEDWEFEIPVQAGMSSFPSSWSRVRIRHLEMHFVKEASGIGGEIIHQPTTQTGTVYILLQGSTIFHDRRRDQVLPFQAAAPLNYHYAYRLDTGDSTLTNEPSEQFANKFMQMTPFTRWRLRLSASAKENAGLAFPTATALDSTTQIVITFHVTAIRQIDWRHDEE

SEQ ID NO: 642 - protein, 867 aa, synthetic construct
  REGION 1..867: note = PtIP-83 polypeptide variant
MALVDYGKLFEDLNQISMGVLDRVEFSEVMVIHRMYVRLADLNVGQLEGAEKVKRLYVFADVVELPVVEWRWPPQIPGSVTVIILCRLLQWPTDGRQSDTELHLTFMKLHAIQREENRWEITAADGMNWGVYIHAEEVQVGVLTMSWSSVLRVSALRSVITSGFRAVSVFEVPGSVRSTLGATLRPDHALYSTTMQATPNASHISAFNLRIVSPSAYRVCPLQNDTDTYLGIPADVAAVLPVDVVTDPNILLGMQTTVHIAELVKACHPSPDVVSAVGEHLNWLNKLLLPLKESTQLQGSESYKECLALLGRVHAAMKMVRIGLVVPQLQYRMYGSLINQMAQVAQNYDREFKQFKLFIIQNQILGSYLLQQNRAFAERELQMESFHAAVISQRREELDNTFAKMDRLSGQMEAESSAMEQAKKEMDEGLRQFQNRQVANALFAVLSAVAQIGLAFLTAGATAPGAVASAGQAVSIAGQAAQGLRRVVEILEQLEAVMEVVAAVKDLVDSLEQVGQIVDAPVMPELPSEADWSIFVNEVEAVAEGMPTEVSEVPVWRAKCKNVAALGREMSITAVQMSELQYDIWVQGMMRDMARSQADRLAAIQPADLTNYLEMVSEMDMRTTRMLLELIRVLYIQNAALQYEYLQTPAPLNAWPVTMQTVWGLLVQQETAAINGLLQMGAPSDYTQEYAVRDVPVRLLLGGGDWEFEIPVQAGMSSFPSSWSRVRIRHLEMHFVKEASGIGGEIIHQPTTQTGTVYILLQGSTIFHDRRRDQVLPFQAAAPLNYHYAYRLDTGDSTLTNEPSEQFANKFMQMTPFTRWRLRLSASAKENAGLAFPTATALDSTTQIVITFHVTAIRQIDWRHDEE

SEQ ID NO: 643 - protein, 868 aa, synthetic construct
  REGION 1..868: note = PtIP-83 polypeptide variant
MALVDYGKLFEDLNQISMGVLDRVEFSEVMVIHRMYVRLADLNVGQLEGAEKVKRLYVFADVVELPVVEWRWPPQIPGSVTVIILCRLLQWPTDGRQSDTELHLTFMKLHAIQREENRWEITAADGMNWGVYIHAEEVQVGVLTMSWSSVLRVSALRSVITSGFRAVSVFEVPGSVRSTLGATLRPDHALYSTTMQATPNASHISAFNLRIVSPSAYRVCPLQNDTDTYLGIPADVAAVLPVDVVTDPNILLGMQTTVHIAELVKACHPSPDVVSAVGEHLNWLNKLLLPLKESTQLQGSESYKECLALLGRVHAAMKMVRIGLVVPQLQYRMYGSLINQMAQVAQNYDREFKQFKLFIIQNQILGSYLLQQNRAFAERELQMESFHAAVISQRREELDNTFAKMDRLSGQMEAESSAMEQAKKEMDEGLRQFQNRQVANALFAVLSAVAQIGLAFLTAGATAPGAVASAGQAVSIAGQAAQGLRRVVEILEQLEAVMEVVAAVKDLVDSLEQVGQIVDAPVMPELPSEADWSIFVNEVEAVAEGMPTEVSEVPVWRAKCKNVAALGREMSITAVQMSELQYDIWVQGMMRDMARSQADRLAAIQPADLTNYLEMATQMDMRTTRMLLGLLNILRIQNAALRYEYLLMPTELTTWPLGMDTVGDLLIAQENAALIGLMQLGPSSDFTSRHVVKDIPVNLLLDGEDWEFEIPVQAGMSSFPSSWSRVRIRHLEMHFVKEASGIGGEIIHQPVTSTGEVYMLLQSSRFFEDRAKRENEFISYEGGMGLQYQYAYRLATGDATVTNVPSEEYANTFMRLAPFTRWRLRLSASAPENKGLAFPTATLADATTRIKITFHVSAIRRISTRVAV

SEQ ID NO: 644 - protein, 866 aa, synthetic construct
  REGION 1..866: note = PtIP-83 polypeptide variant
MALVDYGKLFEDLNQISMGVLDRVEFSEVMVIHRMYVRLADLNVGQLEGAEKVKRLYVFADVVELPVVEWRWPPQIPGSVTVIILCRLLQWPTDGRQSDTELHLTFMKLHAIQREENRWEITAADGMNWGVYIHAEEVQVGVLTMSWSSVLRVSALRSVITSGFRAVSVFEVPGSVRSTLGATLRPDHALYSTTMQATPNASHISAFNLRIVSPSAYRVCPLQNDTDTYLGIPADVAAVLPVDVVTDPNILLGMQTTVHIAELVKACHPSPDVVSAVGEHLNWLNKLLLPLKESTQLQGSESYKECLALLGRVHAAMKMVRIGLVVPQLQYRMYGSLINQMAQVAQNYDREFKQFKLFIIQNQILGSYLLQQNRAFAERELQMESFHAAVISQRREELDNTFAKMDRLSGQMEAESSAMEQAKKEMDEGLRQFQNRQVANALFAVLSAVAQIGLAFLTAGATAPGAVASAGQAVSIAGQAAQGLRRVVEILEQLEAVMEVVAAVKDLVDSLEQVGQIVDAPVMPELPSEADWSIFVNEVEAVAEGMPTEVSEVPVWRAKCKNVAALGREMSITAVQMSELQYDIWVQGMMRDMARSQADRLAAIQPADLTNYLEMATQMDMRTTRMLLGLLNILRIQNAALRYEYLLMPTELTTWPLGMDTVGDLLIAQENAALIGLMQLGPSSDFTSRHVVKDIPVNLLLDGEDWEFEIPVQAGMSSFPSSWSRVRIRHLEMHFVKEASGIGGEIIHQPTTQTGTVYILLQGSTIFHDRRRDQVLPFQAAAPLNYHYAYRLDTGDSTLTNEPSEQFANKFMQMTPFTRWRLRLSASAPENKGLAFPTATLADATTRIKITFHVSAIRRISTRVAV

SEQ ID NO: 645 - protein, 867 aa, synthetic construct
  REGION 1..867: note = PtIP-83 polypeptide variant
MALVDYGKLFEDLNQISMGVLDRVEFSEVMVIHRMYVRLADLNVGQLEGAEKVKRLYVFADVVELPVVEWRWPPQIPGSVTVIILCRLLQWPTDGRQSDTELHLTFMKLHAIQREENRWEITAADGMNWGVYIHAEEVQVGVLTMSWSSVLRVSALRSVITSGFRAVSVFEVPGSVRSTLGATLRPDHALYSTTMQATPNASHISAFNLRIVSPSAYRVCPLQNDTDTYLGIPADVAAVLPVDVVTDPNILLGMQTTVHIAELVKACHPSPDVVSAVGEHLNWLNKLLLPLKESTQLQGSESYKECLALLGRVHAAMKMVRIGLVVPQLQYRMYKDLIDRMVQVAQSYDQDFKQLKLFVEQNKILGSYLLEQNKAFAEKEKDMDAFHSQVIDLRTSELESTIERMDDLSKQMEEQNAAMEQAKADMDAGLIAYQNKQVANAVFAVLGAIASIGLAFATGGATAPGAVASAGAAVTAAGKAAEGLKKVVEILEGLQAVMEVVAVIKELVQSLQEIGQLVDAPEMPDLPSDAEWEIFVNEVEAVAEQMPTEVTEVPAWKAKCKNVAALGREMSTMAAHIAELQFEIQVQEMLREIAKKQADRLSSIKPADLTNYLEMVSEMDMRTTRMLLELIRVLYIQNAALQYEYLQTPAPLNAWPVTMQTVWGLLVQQETAAINGLLQMGAPSDYTQEYAVRDVPVRLLLGGGDWEFEIPVQAGMSSFPSSWSRVRIRHLEMHFVKEASGIGGEIIHQPTTQTGTVYILLQGSTIFHDRRRDQVLPFQAAAPLNYHYAYRLDTGDSTLTNEPSEQFANKFMQMTPFTRWRLRLSASAKENAGLAFPTATALDSTTQIVITFHVTAIRQIDWRHDEE

SEQ ID NO: 646 - protein, 50 aa, synthetic construct
  REGION 1..50: note = amino acid sequence motif
  VARIANT 3: note = MISC_FEATURE - Xaa at position 3 is Asp or Glu
  VARIANT 17: note = MISC_FEATURE - Xaa at position 17 is Ile or Val
  VARIANT 33: note = MISC_FEATURE - Xaa at position 33 is Ala or Val
  VARIANT 41: note = MISC_FEATURE - Xaa at position 41 is Met or Val
  VARIANT 49: note = MISC_FEATURE - Xaa at position 49 is Ser or Cys
MPXMPSEADWSIFVNEXEAVAEGMPTEVSEVPXWKAKCKNXAALGREMXI

SEQ ID NO: 647 - protein, 50 aa, synthetic construct
  REGION 1..50: note = amino acid sequence motif
  VARIANT 10: note = MISC_FEATURE - Xaa at position 10 is Asn or Ser
  VARIANT 13: note = MISC_FEATURE - Xaa at position 13 is Lys or Asn
  VARIANT 25: note = MISC_FEATURE - Xaa at position 25 is Glu or Asp
  VARIANT 29: note = MISC_FEATURE - Xaa at position 29 is Phe or Leu
  VARIANT 34: note = MISC_FEATURE - Xaa at position 34 is Ile or Ala
  VARIANT 39: note = MISC_FEATURE - Xaa at position 39 is Leu or Phe
  VARIANT 48: note = MISC_FEATURE - Xaa at position 48 is Lys or Arg
PQLQYRMYGXLIXQMAQVAQNYDQXFKQXKLFIXQNQIXGSYLLQQNXAF

SEQ ID NO: 648 - protein, 50 aa, synthetic construct
  REGION 1..50: note = amino acid sequence motif
  VARIANT 25: note = MISC_FEATURE - Xaa at position 25 is Glu or Gly
  VARIANT 34: note = MISC_FEATURE - Xaa at position 34 is Pro or Leu
  VARIANT 39: note = MISC_FEATURE - Xaa at position 39 is Glu or Gln
  VARIANT 40: note = MISC_FEATURE - Xaa at position 40 is Ile or Val
NTFMQMTPFTRWRLRLSASASENAXLAFPTATAXDSTTXXVITFHVTAIR

SEQ ID NO: 649 - protein, 36 aa, synthetic construct
  REGION 1..36: note = amino acid sequence motif
  VARIANT 1: note = MISC_FEATURE - Xaa at position 1 is Asp or Asn
  VARIANT 10: note = MISC_FEATURE - Xaa at position 10 is Gly or Asp
  VARIANT 30: note = MISC_FEATURE - Xaa at position 30 is Ala or Gly
XFTSRHVVKXIPVSLLLDGEDWEFEIPVQXGMSSFP

SEQ ID NO: 650 - protein, 50 aa, synthetic construct
  REGION 1..50: note = amino acid sequence motif
  VARIANT 6: note = MISC_FEATURE - Xaa at position 6 is Ser or Ala
  VARIANT 8: note = MISC_FEATURE - Xaa at position 8 is Arg or Gln
  VARIANT 9: note = MISC_FEATURE - Xaa at position 9 is Ser or Thr
  VARIANT 11: note = MISC_FEATURE - Xaa at position 11 is Ile or Thr
  VARIANT 28: note = MISC_FEATURE - Xaa at position 28 is Asp or Glu
  VARIANT 37: note = MISC_FEATURE - Xaa at position 37 is Asp or Ala
  VARIANT 41: note = MISC_FEATURE - Xaa at position 41 is Phe or Tyr
  VARIANT 42: note = MISC_FEATURE - Xaa at position 42 is Gln or His
IIHQPXTXXGXVYILLQGSTIFHDRRRXEVMTFQAAXPLNXXYAYRLDTG

SEQ ID NO: 651 - protein, 50 aa, synthetic construct
  REGION 1..50: note = amino acid sequence motif
  VARIANT 2: note = MISC_FEATURE - Xaa at position 2 is His or Gln
  VARIANT 12: note = MISC_FEATURE - Xaa at position 12 is Ala or Val
  VARIANT 17: note = MISC_FEATURE - Xaa at position 17 is His or Tyr
  VARIANT 23: note = MISC_FEATURE - Xaa at position 23 is His or Gln
  VARIANT 30: note = MISC_FEATURE - Xaa at position 30 is Arg or Ser
  VARIANT 31: note = MISC_FEATURE - Xaa at position 31 is Met or Ile
  VARIANT 33: note = MISC_FEATURE - Xaa at position 33 is Ile or Leu
  VARIANT 38: note = MISC_FEATURE - Xaa at position 38 is Met or Ile
SXADRLAAIQPXDLTNXLEMATXMDMRTTXXLXGLLNXLRIQNAALMYEY

SEQ ID NO: 652 - protein, 44 aa, synthetic construct
  REGION 1..44: note = amino acid sequence motif
  VARIANT 1: note = MISC_FEATURE - Xaa at position 1 is Val or Leu
  VARIANT 20: note = MISC_FEATURE - Xaa at position 20 is Ser or Ala
  VARIANT 23: note = MISC_FEATURE - Xaa at position 23 is Asn or Asp
  VARIANT 28: note = MISC_FEATURE - Xaa at position 28 is Pro or Glu
  VARIANT 31: note = MISC_FEATURE - Xaa at position 31 is Glu or Gly
  VARIANT 32: note = MISC_FEATURE - Xaa at position 32 is Arg or Lys
  VARIANT 36: note = MISC_FEATURE - Xaa at position 36 is Val or Leu
  VARIANT 39: note = MISC_FEATURE - Xaa at position 39 is Phe or Leu
XDRVEFSEVMVIHRMYVRLXDLXVGELXGAXXVKRXYVXADVVE

SEQ ID NO: 653 - protein, 50 aa, synthetic construct
  REGION 1..50: note = amino acid sequence motif
  VARIANT 2: note = MISC_FEATURE - Xaa at position 2 is Asp or Glu
  VARIANT 23: note = MISC_FEATURE - Xaa at position 23 is Asn or Asp
  VARIANT 26: note = MISC_FEATURE - Xaa at position 26 is Ile or Phe
  VARIANT 30: note = MISC_FEATURE - Xaa at position 30 is Asp or Glu
  VARIANT 32: note = MISC_FEATURE - Xaa at position 32 is Leu or Met
  VARIANT 40: note = MISC_FEATURE - Xaa at position 40 is Asn or Ser
AXRELQMESFHSAVISQRRQELXTAXAKMXRXSLQMEEEXRAMEQAQKEM

SEQ ID NO: 654 - protein, 50 aa, synthetic construct
  REGION 1..50: note = amino acid sequence motif
  VARIANT 12: note = MISC_FEATURE - Xaa at position 12 is Ala or Val
  VARIANT 28: note = MISC_FEATURE - Xaa at position 28 is Ala or Gly
  VARIANT 38: note = MISC_FEATURE - Xaa at position 38 is Gly or Gln
  VARIANT 49: note = MISC_FEATURE - Xaa at position 49 is Val or Ile
FVTAGATAPGAXASAGQAVSIAGQAAQXLRRVVEILEXLEAVMEVVAAXK

SEQ ID NO: 655 - protein, 50 aa, synthetic construct
  REGION 1..50: note = amino acid sequence motif
  VARIANT 7: note = MISC_FEATURE - Xaa at position 7 is Ile or Thr
  VARIANT 10: note = MISC_FEATURE - Xaa at position 10 is Tyr or His
  VARIANT 13: note = MISC_FEATURE - Xaa at position 13 is Lys or Gln
  VARIANT 15: note = MISC_FEATURE - Xaa at position 15 is Glu or Gln
  VARIANT 34: note = MISC_FEATURE - Xaa at position 34 is Thr or Ile
  VARIANT 43: note = MISC_FEATURE - Xaa at position 43 is Val or Phe
  VARIANT 49: note = MISC_FEATURE - Xaa at position 49 is Ile or Val
DGMNWGXYIXGEXVXRSPLLPSNAILAVWADRCXITSARHNHXNAPGRXI

SEQ ID NO: 656 - protein, 50 aa, synthetic construct
  REGION 1..50: note = amino acid sequence motif
  VARIANT 1: note = MISC_FEATURE - Xaa at position 1 is Lys or Val
  VARIANT 2: note = MISC_FEATURE - Xaa at position 2 is Val or Lys
  VARIANT 3: note = MISC_FEATURE - Xaa at position 3 is Cys or Ala
  VARIANT 11: note = MISC_FEATURE - Xaa at position 11 is Met or Val
  VARIANT 31: note = MISC_FEATURE - Xaa at position 31 is Lys or Asn
  VARIANT 35: note = MISC_FEATURE - Xaa at position 35 is Leu or Met
  VARIANT 39: note = MISC_FEATURE - Xaa at position 39 is Ala or Glu
XXXRPPSPDMXSAVAEHALWLNDVLLQVVQXESQXQGTXPYNECLALLGR

SEQ ID NO: 657 - protein, 36 aa, synthetic construct
  REGION 1..36: note = amino acid sequence motif
  VARIANT 6: note = MISC_FEATURE - Xaa at position 6 is Val or Ala
  VARIANT 15: note = MISC_FEATURE - Xaa at position 15 is Ala or Gly
  VARIANT 27: note = MISC_FEATURE - Xaa at position 27 is Val or Leu
PTELTXWPLGMDTVXNLLIAQENAALXGLIQLGPSS

SEQ ID NO: 658 - protein, 30 aa, synthetic construct
  REGION 1..30: note = amino acid sequence motif
  VARIANT 4: note = MISC_FEATURE - Xaa at position 4 is Met or Thr
  VARIANT 5: note = MISC_FEATURE - Xaa at position 5 is His or Gln
  VARIANT 14: note = MISC_FEATURE - Xaa at position 14 is Ile or Val
  VARIANT 23: note = MISC_FEATURE - Xaa at position 23 is Ile or Thr
  VARIANT 29: note = MISC_FEATURE - Xaa at position 29 is Thr or Ala
RDQXXMPGSVTVIXLCRLLQFPXDGSQAXT

SEQ ID NO: 659 - protein, 26 aa, synthetic construct
  REGION 1..26: note = amino acid sequence motif
  VARIANT 12: note = MISC_FEATURE - Xaa at position 12 is Ser or Asn
  VARIANT 22: note = MISC_FEATURE - Xaa at position 22 is Leu or His
TSIPVEVVTDPXILLGMQTTVXIAEL

SEQ ID NO: 660 - protein, 26 aa, synthetic construct
  REGION 1..26: note = amino acid sequence motif
  VARIANT 5: note = MISC_FEATURE - Xaa at position 5 is Glu or Gln
  VARIANT 15: note = MISC_FEATURE - Xaa at position 15 is Val or Leu
  VARIANT 24: note = MISC_FEATURE - Xaa at position 24 is Met or Gln
  VARIANT 26: note = MISC_FEATURE - Xaa at position 26 is Ala or Gly
EGLRXFQNRQVARAXFAVLKAVAXIX

SEQ ID NO: 661 - protein, 19 aa, synthetic construct
  REGION 1..19: note = amino acid sequence motif
  VARIANT 2: note = MISC_FEATURE - Xaa at position 2 is Thr or Ser
  VARIANT 12: note = MISC_FEATURE - Xaa at position 12 is Gln or His
  VARIANT 14: note = MISC_FEATURE - Xaa at position 14 is Ala or Val
WXRVRIRHLEMXFXQEASG

SEQ ID NO: 662 - protein, 19 aa, synthetic construct
  REGION 1..19: note = amino acid sequence motif
  VARIANT 8: note = MISC_FEATURE - Xaa at position 8 is Glu or Asp
  VARIANT 14: note = MISC_FEATURE - Xaa at position 14 is Leu or Met
  VARIANT 15: note = MISC_FEATURE - Xaa at position 15 is Met or Ile
QISELQYXIWVQGXXRDIA

SEQ ID NO: 663 - protein, 36 aa, synthetic construct
  REGION 1..36: note = amino acid sequence motif
TFTLGSGVTGITSMHGEPSLDPWNGVSLDSASPTAF

SEQ ID NO: 664 - protein, 14 aa, synthetic construct
  REGION 1..14: note = amino acid sequence motif
MDYSTLYRDLNQIS

SEQ ID NO: 665 - protein, 19 aa, synthetic construct
  REGION 1..19: note = amino acid sequence motif
  VARIANT 7: note = MISC_FEATURE - Xaa at position 7 is Gln or Lys
  VARIANT 17: note = MISC_FEATURE - Xaa at position 17 is Val or Arg
  VARIANT 19: note = MISC_FEATURE - Xaa at position 19 is Ser or Glu
LRLPFMXLHARVIEQNXKX

SEQ ID NO: 666 - protein, 14 aa, synthetic construct
  REGION 1..14: note = amino acid sequence motif
  VARIANT 9: note = MISC_FEATURE - Xaa at position 9 is Gln or His
  VARIANT 10: note = MISC_FEATURE - Xaa at position 10 is Ile or Leu
  VARIANT 12: note = MISC_FEATURE - Xaa at position 12 is Gly or Asp
VDSLEQVGXXVXAP

SEQ ID NO: 667 - protein, 14 aa, synthetic construct
  REGION 1..14: note = amino acid sequence motif
  VARIANT 1: note = MISC_FEATURE - Xaa at position 1 is Ile or Val
  VARIANT 2: note = MISC_FEATURE - Xaa at position 2 is Glu or Gln
  VARIANT 3: note = MISC_FEATURE - Xaa at position 3 is Cys or Ala
  VARIANT 7: note = MISC_FEATURE - Xaa at position 7 is Ile or Met
  VARIANT 11: note = MISC_FEATURE - Xaa at position 11 is Val or Gly
  VARIANT 12: note = MISC_FEATURE - Xaa at position 12 is Ser or Leu
XXXVMKXGRFXXVV

SEQ ID NO: 668 - protein, 10 aa, synthetic construct
  REGION 1..10: note = amino acid sequence motif
  VARIANT 9: note = MISC_FEATURE - Xaa at position 9 is Glu or Gln
TLTNEPSEXF

SEQ ID NO: 669 - protein, 10 aa, synthetic construct
  REGION 1..10: note = amino acid sequence motif
LPRQSRNISF

SEQ ID NO: 670 - protein, 50 aa, synthetic construct
  REGION 1..50: note = amino acid sequence motif
  VARIANT 3: note = MISC_FEATURE - Xaa at position 3 is Asp or Glu
  VARIANT 6: note = MISC_FEATURE - Xaa at position 6 is Ser or Thr
  VARIANT 7: note = MISC_FEATURE - Xaa at position 7 is Glu or Asp
  VARIANT 17: note = MISC_FEATURE - Xaa at position 17 is Ile, Val or Leu
  VARIANT 33: note = MISC_FEATURE - Xaa at position 33 is Ala or Val
  VARIANT 35: note = MISC_FEATURE - Xaa at position 35 is Lys or Arg
  VARIANT 41: note = MISC_FEATURE - Xaa at position 41 is Met or Val
  VARIANT 49: note = MISC_FEATURE - Xaa at position 49 is Ser or Cys
MPXMPXXADWSIFVNEXEAVAEGMPTEVSEVPXWXAKCKNXAALGREMXI

SEQ ID NO: 671 - protein, 50 aa, synthetic construct
  REGION 1..50: note = amino acid sequence motif
  VARIANT 10: note = MISC_FEATURE - Xaa at position 10 is Asn or Ser
  VARIANT 13: note = MISC_FEATURE - Xaa at position 13 is Lys, Arg or Asn
  VARIANT 24: note = MISC_FEATURE - Xaa at position 24 is Gln or Arg
  VARIANT 25: note = MISC_FEATURE - Xaa at position 25 is Glu or Asp
  VARIANT 28: note = MISC_FEATURE - Xaa at position 28 is Gln or Arg
  VARIANT 29: note = MISC_FEATURE - Xaa at position 29 is Phe or Leu
  VARIANT 30: note = MISC_FEATURE - Xaa at position 30 is Lys or Arg
  VARIANT 34: note = MISC_FEATURE - Xaa at position 34 is Ile, Ala, Val or Leu
  VARIANT 39: note = MISC_FEATURE - Xaa at position 39 is Leu or Phe
  VARIANT 45: note = MISC_FEATURE - Xaa at position 45 is Gln or Glu
  VARIANT 48: note = MISC_FEATURE - Xaa at position 48 is Lys or Arg
PQLQYRMYGXLIXQMAQVAQNYDXXFKXXXLFIXQNQIXGSYLLXQNXAF

SEQ ID NO: 672 - protein, 50 aa, synthetic construct
  REGION 1..50: note = amino acid sequence motif
  VARIANT 2: note = MISC_FEATURE - Xaa at position 2 is Thr or Lys
  VARIANT 11: note = MISC_FEATURE - Xaa at position 11 is Arg or His
  VARIANT 21: note = MISC_FEATURE - Xaa at position 21 is Ser, Pro, Lys or Ala
  VARIANT 24: note = MISC_FEATURE - Xaa at position 24 is Ala or Lys
  VARIANT 25: note = MISC_FEATURE - Xaa at position 25 is Glu or Gly
  VARIANT 34: note = MISC_FEATURE - Xaa at position 34 is Pro or Leu
  VARIANT 39: note = MISC_FEATURE - Xaa at position 39 is Glu or Gln
  VARIANT 40: note = MISC_FEATURE - Xaa at position 40 is Ile or Val
  VARIANT 41: note = MISC_FEATURE - Xaa at position 41 is Val or Ala
NXFMQMTPFTXWRLRLSASAXENXXLAFPTATAXDSTTXXXITFHVTAIR

SEQ ID NO: 673 - protein, 36 aa, synthetic construct
  REGION 1..36: note = amino acid sequence motif
  VARIANT 1: note = MISC_FEATURE - Xaa at position 1 is Asp or Asn
  VARIANT 10: note = MISC_FEATURE - Xaa at position 10 is Gly or Asp
  VARIANT 14: note = MISC_FEATURE - Xaa at position 14 is Ser or Asn
  VARIANT 20: note = MISC_FEATURE - Xaa at position 20 is Glu or Gly
  VARIANT 30: note = MISC_FEATURE - Xaa at position 30 is Ala or Gly
XFTSRHVVKXIPVXLLLDGXDWEFEIPVQXGMSSFP

SEQ ID NO: 674 - protein, 50 aa, synthetic construct
  REGION 1..50: note = amino acid sequence motif
  VARIANT 6: note = MISC_FEATURE - Xaa at position 6 is Ser or Ala
  VARIANT 8: note = MISC_FEATURE - Xaa at position 8 is Arg or Gln
  VARIANT 9: note = MISC_FEATURE - Xaa at position 9 is Ser or Thr
  VARIANT 11: note = MISC_FEATURE - Xaa at position 11 is Ile or Thr
  VARIANT 12: note = MISC_FEATURE - Xaa at position 12 is Val or Ile
  VARIANT 21: note = MISC_FEATURE - Xaa at position 21 is Ile or Val
  VARIANT 28: note = MISC_FEATURE - Xaa at position 28 is Asp or Glu
  VARIANT 29: note = MISC_FEATURE - Xaa at position 29 is Glu or Gln
  VARIANT 31: note = MISC_FEATURE - Xaa at position 31 is Met or Leu
  VARIANT 33: note = MISC_FEATURE - Xaa at position 33 is Phe or Pro
  VARIANT 37: note = MISC_FEATURE - Xaa at position 37 is Asp, Ala or Val
  VARIANT 41: note = MISC_FEATURE - Xaa at position 41 is Phe or Tyr
  VARIANT 42: note = MISC_FEATURE - Xaa at position 42 is Gln or His
IIHQPXTXXGXXYILLQGSTXFHDRRRXXVXTXQAAXPLNXXYAYRLDTG

SEQ ID NO: 675 - protein, 50 aa, synthetic construct
  REGION 1..50: note = amino acid sequence motif
  VARIANT 2: note = MISC_FEATURE - Xaa at position 2 is His or Gln
  VARIANT 12: note = MISC_FEATURE - Xaa at position 12 is Ala or Val
  VARIANT 13: note = MISC_FEATURE - Xaa at position 13 is Asp or Asn
  VARIANT 17: note = MISC_FEATURE - Xaa at position 17 is His, Tyr or Phe
  VARIANT 23: note = MISC_FEATURE - Xaa at position 23 is His or Gln
  VARIANT 30: note = MISC_FEATURE - Xaa at position 30 is Arg or Ser
  VARIANT 31: note = MISC_FEATURE - Xaa at position 31 is Met or Ile
  VARIANT 33: note = MISC_FEATURE - Xaa at position 33 is Ile or Leu
  VARIANT 38: note = MISC_FEATURE - Xaa at position 38 is Met or Ile
  VARIANT 39: note = MISC_FEATURE - Xaa at position 39 is Leu or Met
  VARIANT 47: note = MISC_FEATURE - Xaa at position 47 is Met or Arg
SXADRLAAIQPXXLTNXLEMATXMDMRTTXXLXGLLNXXRIQNAALXYEY

SEQ ID NO: 676 - protein, 45 aa, synthetic construct
  REGION 1..45: note = amino acid sequence motif
  VARIANT 1: note = MISC_FEATURE - Xaa at position 1 is Val or Leu
  VARIANT 3: note = MISC_FEATURE - Xaa at position 3 is Arg or Gln
  VARIANT 21: note = MISC_FEATURE - Xaa at position 21 is Ser or Ala
  VARIANT 24: note = MISC_FEATURE - Xaa at position 24 is Asn or Asp
  VARIANT 26: note = MISC_FEATURE - Xaa at position 26 is Gly or Ala
  VARIANT 27: note = MISC_FEATURE - Xaa at position 27 is Glu or Gln
  VARIANT 29: note = MISC_FEATURE - Xaa at position 29 is Pro or Glu
  VARIANT 32: note = MISC_FEATURE - Xaa at position 32 is Glu or Gly
  VARIANT 33: note = MISC_FEATURE - Xaa at position 33 is Arg or Lys
  VARIANT 37: note = MISC_FEATURE - Xaa at position 37 is Val or Leu
  VARIANT 40: note = MISC_FEATURE - Xaa at position 38 is Phe or Leu
XDXVEFSEVMVIHRMYVNRLXDLXVXXLXGAXXVKRXYVXADVVE

SEQ ID NO: 677 - protein, 50 aa, synthetic construct
  REGION 1..50: note = amino acid sequence motif
  VARIANT 2: note = MISC_FEATURE - Xaa at position 2 is Asp or Glu
  VARIANT 12: note = MISC_FEATURE - Xaa at position 12 is Ser or Ala
  VARIANT 18: note = MISC_FEATURE - Xaa at position 18 is Arg or Lys
  VARIANT 20: note = MISC_FEATURE - Xaa at position 20 is Gln, Gly or Glu
  VARIANT 23: note = MISC_FEATURE - Xaa at position 23 is Asn or Asp
  VARIANT 24: note = MISC_FEATURE - Xaa at position 24 is Thr or Asp
  VARIANT 25: note = MISC_FEATURE - Xaa at position 25 is Ala or Thr
  VARIANT 26: note = MISC_FEATURE - Xaa at position 26 is Ile or Phe
  VARIANT 30: note = MISC_FEATURE - Xaa at position 30 is Asp or Glu
  VARIANT 32: note = MISC_FEATURE - Xaa at position 32 is Leu or Met
  VARIANT 40: note = MISC_FEATURE - Xaa at position 40 is Asn, Ser or Asp
  VARIANT 41: note = MISC_FEATURE - Xaa at position 41 is Arg or Gly
  VARIANT 47: note = MISC_FEATURE - Xaa at position 47 is Gln or Arg
AXRELQMESFHXAVISQXRXELXXXXAKMXRXSLQMEEEXXAMEQAXKEM

SEQ ID NO: 678 - protein, 50 aa, synthetic construct
  REGION 1..50: note = amino acid sequence motif
  VARIANT 2: note = MISC_FEATURE - Xaa at position 2 is Val or Leu
  VARIANT 12: note = MISC_FEATURE - Xaa at position 12 is Ala or Val
  VARIANT 20: note = MISC_FEATURE - Xaa at position 20 is Ser or Asn
  VARIANT 28: note = MISC_FEATURE - Xaa at position 28 is Ala or Gly
  VARIANT 38: note = MISC_FEATURE - Xaa at position 38 is Gly or Gln
  VARIANT 49: note = MISC_FEATURE - Xaa at position 49 is Val or Ile
FXTAGATAPGAXASAGQAVXIAGQAAQXLRRVVEILEXLEAVMEVVAAXK

SEQ ID NO: 679 - protein, 50 aa, synthetic construct
  REGION 1..50: note = amino acid sequence motif
  VARIANT 2: note = MISC_FEATURE - Xaa at position 2 is Gly or Asp
  VARIANT 3: note = MISC_FEATURE - Xaa at position 3 is Met or Ala
  VARIANT 4: note = MISC_FEATURE - Xaa at position 4 is Asn or Lys
  VARIANT 7: note = MISC_FEATURE - Xaa at position 7 is Ile or Thr
  VARIANT 9: note = MISC_FEATURE - Xaa at position 9 is Ile or Val
  VARIANT 10: note = MISC_FEATURE - Xaa at position 10 is Tyr or His
  VARIANT 11: note = MISC_FEATURE - Xaa at position 11 is Gly or Ala
  VARIANT 13: note = MISC_FEATURE - Xaa at position 13 is Lys or Glu
  VARIANT 15: note = MISC_FEATURE - Xaa at position 15 is Glu or Gln
  VARIANT 16: note = MISC_FEATURE - Xaa at position 16 is Arg, Val or Leu
  VARIANT 20: note = MISC_FEATURE - Xaa at position 20 is Leu, Tyr or Phe
  VARIANT 21: note = MISC_FEATURE - Xaa at position 21 is Pro or Asn
  VARIANT 22: note = MISC_FEATURE - Xaa at position 22 is Ser, Asn or Gly
  VARIANT 23: note = MISC_FEATURE - Xaa at position 23 is Asn or Trp
  VARIANT 24: note = MISC_FEATURE - Xaa at position 24 is Ala, Ser or Pro
  VARIANT 25: note = MISC_FEATURE - Xaa at position 25 is Ile or Tyr
  VARIANT 27: note = MISC_FEATURE - Xaa at position 27 is Ala, Gly or Val
  VARIANT 29: note = MISC_FEATURE - Xaa at position 29 is Trp or Glu
  VARIANT 31: note = MISC_FEATURE - Xaa at position 31 is Asp or Gln
  VARIANT 33: note = MISC_FEATURE - Xaa at position 33 is Cys or Ser
  VARIANT 34: note = MISC_FEATURE - Xaa at position 34 is Thr or Ile
  VARIANT 37: note = MISC_FEATURE - Xaa at position 37 is Ser or Ala
  VARIANT 39: note = MISC_FEATURE - Xaa at position 39 is Arg, Phe or Met
  VARIANT 42: note = MISC_FEATURE - Xaa at position 42 is His, Val or Thr
  VARIANT 43: note = MISC_FEATURE - Xaa at position 43 is Val or Phe
  VARIANT 44: note = MISC_FEATURE - Xaa at position 44 is Asn or Asp
  VARIANT 45: note = MISC_FEATURE - Xaa at position 45 is Ala, Glu or Arg
  VARIANT 48: note = MISC_FEATURE - Xaa at position 48 is Arg or Trp
  VARIANT 49: note = MISC_FEATURE - Xaa at position 49 is Ile or Val
  VARIANT 50: note = MISC_FEATURE - Xaa at position 50 is Ile or Arg
DXXXWGXYXXXEXVXXSPLXXXXXXLXVXAXRXXITXAXHNXXXXPGXXX

SEQ ID NO: 680 - protein, 50 aa, synthetic construct
  REGION 1..50: note = amino acid sequence motif
  VARIANT 1: note = MISC_FEATURE - Xaa at position 1 is Lys or Val
  VARIANT 2: note = MISC_FEATURE - Xaa at position 2 is Val or Lys
  VARIANT 3: note = MISC_FEATURE - Xaa at position 3 is Cys or Ala
  VARIANT 4: note = MISC_FEATURE - Xaa at position 4 is Arg, Gly or Cys
  VARIANT 5: note = MISC_FEATURE - Xaa at position 5 is Pro, His or Tyr
  VARIANT 9: note = MISC_FEATURE - Xaa at position 9 is Asp or Glu
  VARIANT 10: note = MISC_FEATURE - Xaa at position 10 is Met, Ile or Leu
  VARIANT 11: note = MISC_FEATURE - Xaa at position 11 is Met or Val
  VARIANT 15: note = MISC_FEATURE - Xaa at position 15 is Ala or Gly
  VARIANT 16: note = MISC_FEATURE - Xaa at position 16 is Glu or Val
  VARIANT 19: note = MISC_FEATURE - Xaa at position 19 is Leu, Ile or Asn
  VARIANT 22: note = MISC_FEATURE - Xaa at position 22 is Asn or Ser
  VARIANT 23: note = MISC_FEATURE - Xaa at position 23 is Asp or Lys
  VARIANT 27: note = MISC_FEATURE - Xaa at position 27 is Gln or Arg
  VARIANT 31: note = MISC_FEATURE - Xaa at position 31 is Lys or Asn
  VARIANT 34: note = MISC_FEATURE - Xaa at position 34 is Gln or His
  VARIANT 35: note = MISC_FEATURE - Xaa at position 35 is Leu or Met
  VARIANT 39: note = MISC_FEATURE - Xaa at position 39 is Ala or Glu
  VARIANT 40: note = MISC_FEATURE - Xaa at position 40 is Pro, Ser or Ala
XXXXXPSPXXXSAVXXHAXWLXXVLLXVVQXESXXQGTXXYNECLALLGR

SEQ ID NO: 681 - protein, 36 aa, synthetic construct
  REGION 1..36: note = amino acid sequence motif
  VARIANT 1: note = MISC_FEATURE - Xaa at position 1 is Pro or Asn
  VARIANT 3: note = MISC_FEATURE - Xaa at position 3 is Glu or Gln
  VARIANT 6: note = MISC_FEATURE - Xaa at position 6 is Val, Ala or Thr
  VARIANT 10: note = MISC_FEATURE - Xaa at position 10 is Gly or Arg
  VARIANT 15: note = MISC_FEATURE - Xaa at position 15 is Ala or Gly
  VARIANT 16: note = MISC_FEATURE - Xaa at position 16 is Asn or Asp
  VARIANT 20: note = MISC_FEATURE - Xaa at position 20 is Ala or Thr
  VARIANT 21: note = MISC_FEATURE - Xaa at position 21 is Gln or His
  VARIANT 23: note = MISC_FEATURE - Xaa at position 23 is Asn or Ser
  VARIANT 27: note = MISC_FEATURE - Xaa at position 27 is Val, Leu or Ser
  VARIANT 30: note = MISC_FEATURE - Xaa at position 30 is Thr or Trp
  VARIANT 34: note = MISC_FEATURE - Xaa at position 34 is Pro or Gln
  VARIANT 35: note = MISC_FEATURE - Xaa at position 35 is Ser or Pro
XTXLTXWPLXMDTVXXLLIXXEXAALXGLXQLGXXS

SEQ ID NO: 682 - protein, 30 aa, synthetic construct
  REGION 1..30: note = amino acid sequence motif
  VARIANT 1: note = MISC_FEATURE - Xaa at position 1 is Arg, Leu or Cys
  VARIANT 2: note = MISC_FEATURE - Xaa at position 2 is Asp, Leu, Trp or Lys
  VARIANT 3: note = MISC_FEATURE - Xaa at position 3 is Gln, Asn, Pro or Arg
  VARIANT 4: note = MISC_FEATURE - Xaa at position 4 is Met, Thr or Pro
  VARIANT 5: note = MISC_FEATURE - Xaa at position 5 is His, Gln or Arg
  VARIANT 6: note = MISC_FEATURE - Xaa at position 6 is Met, Ile or Leu
  VARIANT 14: note = MISC_FEATURE - Xaa at position 14 is Ile or Val
  VARIANT 23: note = MISC_FEATURE - Xaa at position 23 is Ile or Thr
  VARIANT 24: note = MISC_FEATURE - Xaa at position 24 is Asp or Gly
  VARIANT 26: note = MISC_FEATURE - Xaa at position 26 is Ser or Arg
  VARIANT 27: note = MISC_FEATURE - Xaa at position 27 is Gln, Phe or Arg
  VARIANT 28: note = MISC_FEATURE - Xaa at position 28 is Ala or Ser
  VARIANT 29: note = MISC_FEATURE - Xaa at position 29 is Thr, Ala or Asp
  VARIANT 30: note = MISC_FEATURE - Xaa at position 30 is Thr or Trp
XXXXXXPGSVTVIXLCRLLQFPXXGXXXXX

SEQ ID NO: 683 - protein, 26 aa, synthetic construct
  REGION 1..26: note = amino acid sequence motif
  VARIANT 1: note = MISC_FEATURE - Xaa at position 1 is Thr or Ala
  VARIANT 2: note = MISC_FEATURE - Xaa at position 2 is Ser, Gly or Val
  VARIANT 3: note = MISC_FEATURE - Xaa at position 3 is Ile or Leu
  VARIANT 6: note = MISC_FEATURE - Xaa at position 6 is Glu or Asp
  VARIANT 12: note = MISC_FEATURE - Xaa at position 12 is Ser or Asn
  VARIANT 15: note = MISC_FEATURE - Xaa at position 15 is Leu or Met
  VARIANT 20: note = MISC_FEATURE - Xaa at position 20 is Thr or Ser
  VARIANT 22: note = MISC_FEATURE - Xaa at position 22 is Leu or His
XXXPVXVVTDPXILXGMQTXVXIAEL

SEQ ID NO: 684 - protein, 26 aa, synthetic construct
  REGION 1..26: note = amino acid sequence motif
  VARIANT 5: note = MISC_FEATURE - Xaa at position 5 is Glu or Gln
  VARIANT 9: note = MISC_FEATURE - Xaa at position 9 is Arg or Glu
  VARIANT 13: note = MISC_FEATURE - Xaa at position 13 is Arg or Asn
  VARIANT 15: note = MISC_FEATURE - Xaa at position 15 is Val or Leu
  VARIANT 20: note = MISC_FEATURE - Xaa at position 20 is Lys or Ser
  VARIANT 21: note = MISC_FEATURE - Xaa at position 21 is Ala or Ser
  VARIANT 24: note = MISC_FEATURE - Xaa at position 24 is Met or Gln
  VARIANT 26: note = MISC_FEATURE - Xaa at position 26 is Ala or Gly
EGLRXFQNXQVAXAXFAVLXXVAXIX

SEQ ID NO: 685 - protein, 19 aa, synthetic construct
  REGION 1..19: note = amino acid sequence motif
  VARIANT 2: note = MISC_FEATURE - Xaa at position 2 is Thr or Ser
  VARIANT 12: note = MISC_FEATURE - Xaa at position 12 is Gln or His
  VARIANT 14: note = MISC_FEATURE - Xaa at position 14 is Ala or Val
  VARIANT 15: note = MISC_FEATURE - Xaa at position 15 is Gln or Lys
  VARIANT 17: note = MISC_FEATURE - Xaa at position 17 is Ala or Ser
  VARIANT 18: note = MISC_FEATURE - Xaa at position 18 is Ser or Met
  VARIANT 19: note = MISC_FEATURE - Xaa at position 19 is Gly or Asn
WXRVRIRHLEMXFXXEXXX

SEQ ID NO: 686 - protein, 19 aa, synthetic construct
  REGION 1..19: note = amino acid sequence motif
  VARIANT 2: note = MISC_FEATURE - Xaa at position 2 is Ile or Met
  VARIANT 4: note = MISC_FEATURE - Xaa at position 4 is Glu or Gln
  VARIANT 8: note = MISC_FEATURE - Xaa at position 8 is Glu or Asp
  VARIANT 14: note = MISC_FEATURE - Xaa at position 14 is Leu or Met
  VARIANT 15: note = MISC_FEATURE - Xaa at position 15 is Met or Ile
  VARIANT 18: note = MISC_FEATURE - Xaa at position 18 is Ile or Met
QXSXLQYXIWVQGXXRDXA

SEQ ID NO: 687 - protein, 14 aa, synthetic construct
  REGION 1..14: note = amino acid sequence motif
  VARIANT 1: note = MISC_FEATURE - Xaa at position 1 is Met, Leu or Val
  VARIANT 4: note = MISC_FEATURE - Xaa at position 4 is Ser or Lys
  VARIANT 5: note = MISC_FEATURE - Xaa at position 5 is Thr, Ser or Lys
  VARIANT 7: note = MISC_FEATURE - Xaa at position 7 is Tyr or Phe
  VARIANT 8: note = MISC_FEATURE - Xaa at position 8 is Arg or Glu
XDYXXLXXDLNQIS

SEQ ID NO: 688 - protein, 19 aa, synthetic construct
  REGION 1..19: note = amino acid sequence motif
  VARIANT 2: note = MISC_FEATURE - Xaa at position 2 is Arg, His or Gln
  VARIANT 4: note = MISC_FEATURE - Xaa at position 4 is Pro or Thr
  VARIANT 7: note = MISC_FEATURE - Xaa at position 7 is Gln or Lys
  VARIANT 11: note = MISC_FEATURE - Xaa at position 11 is Arg, Ile or Thr
  VARIANT 12: note = MISC_FEATURE - Xaa at position 12 is Val, Gln or Leu
  VARIANT 13: note = MISC_FEATURE - Xaa at position 13 is Ile or Arg
  VARIANT 15: note = MISC_FEATURE - Xaa at position 15 is Gln, Glu or Arg
  VARIANT 16: note = MISC_FEATURE - Xaa at position 16 is Asn or Phe
  VARIANT 17: note = MISC_FEATURE - Xaa at position 17 is Val or Arg
  VARIANT 18: note = MISC_FEATURE - Xaa at position 18 is Lys, Trp or Ser
  VARIANT 19: note = MISC_FEATURE - Xaa at position 19 is Ser or Glu
LXLXFMXLHAXXXEXXXXX

SEQ ID NO: 689 - protein, 14 aa, synthetic construct
  REGION 1..14: note = amino acid sequence motif
  VARIANT 2: note = MISC_FEATURE - Xaa at position 2 is Asp or Asn
  VARIANT 3: note = MISC_FEATURE - Xaa at position 3 is Ser or Ala
  VARIANT 5: note = MISC_FEATURE - Xaa at position 5 is Glu or Asp
  VARIANT 8: note = MISC_FEATURE - Xaa at position 8 is Gly or Ser
  VARIANT 9: note = MISC_FEATURE - Xaa at position 9 is Gln or His
  VARIANT 10: note = MISC_FEATURE - Xaa at position 10 is Ile or Leu
  VARIANT 12: note = MISC_FEATURE - Xaa at position 12 is Gly or Asp
VXXLXQVXXXVXAP

SEQ ID NO: 690 - skipped

SEQ ID NO: 691 - protein, 10 aa, synthetic construct
  REGION 1..10: note = amino acid sequence motif
  VARIANT 5: note = MISC_FEATURE - Xaa at position 5 is Glu or Gln
  VARIANT 9: note = MISC_FEATURE - Xaa at position 9 is Glu, Gln, Asp or His
TLTNXPSEXF

SEQ ID NO: 692 - protein, 10 aa, synthetic construct
  REGION 1..10: note = amino acid sequence motif
  VARIANT 3: note = MISC_FEATURE - Xaa at position 3 is Arg or Ser
  VARIANT 6: note = MISC_FEATURE - Xaa at position 6 is Arg or Thr
  VARIANT 8: note = MISC_FEATURE - Xaa at position 8 is Ile or Val
LPXQSXNXSF

SEQ ID NO: 693 - protein, 50 aa, synthetic construct; identical to SEQ ID NO: 670
  REGION 1..50: note = amino acid sequence motif
  VARIANT 3: note = MISC_FEATURE - Xaa at position 3 is Asp or Glu
  VARIANT 6: note = MISC_FEATURE - Xaa at position 6 is Ser or Thr
  VARIANT 7: note = MISC_FEATURE - Xaa at position 7 is Glu or Asp
  VARIANT 17: note = MISC_FEATURE - Xaa at position 17 is Ile, Val or Leu
  VARIANT 33: note = MISC_FEATURE - Xaa at position 33 is Ala, Val, Ile or Leu
  VARIANT 35: note = MISC_FEATURE - Xaa at position 35 is Lys or Arg
  VARIANT 41: note = MISC_FEATURE - Xaa at position 41 is Met, Val, Ile or Leu
  VARIANT 49: note = MISC_FEATURE - Xaa at position 49 is Ser, Cys or Thr

SEQ ID NO: 694 - protein, 50 aa, synthetic construct; identical to SEQ ID NO: 671
  REGION 1..50: note = amino acid sequence motif
  VARIANT 10: note = MISC_FEATURE - Xaa at position 10 is Asn or Ser
  VARIANT 13: note = MISC_FEATURE - Xaa at position 13 is Lys, Arg, Asn or Gln
  VARIANT 24: note = MISC_FEATURE - Xaa at position 24 is Gln, Arg, Asn or Lys
  VARIANT 25: note = MISC_FEATURE - Xaa at position 25 is Glu or Asp
  VARIANT 28: note = MISC_FEATURE - Xaa at position 28 is Gln, Arg, Asn or Lys
  VARIANT 29: note = MISC_FEATURE - Xaa at position 29 is Phe or Leu
  VARIANT 30: note = MISC_FEATURE - Xaa at position 30 is Lys or Arg
  VARIANT 34: note = MISC_FEATURE - Xaa at position 34 is Ile, Ala, Val or Leu
  VARIANT 39: note = MISC_FEATURE - Xaa at position 39 is Leu, Phe Ile or Val
  VARIANT 45: note = MISC_FEATURE - Xaa at position 45 is Gln, Glu, Asn or Asp
  VARIANT 48: note = MISC_FEATURE - Xaa at position 48 is Lys or Arg

SEQ ID NO: 695 - protein, 50 aa, synthetic construct; identical to SEQ ID NO: 672
  REGION 1..50: note = amino acid sequence motif
  VARIANT 2: note = MISC_FEATURE - Xaa at position 2 is Thr, Lys, Ser or Arg
  VARIANT 11: note = MISC_FEATURE - Xaa at position 11 is Arg, His or Lys
  VARIANT 21: note = MISC_FEATURE - Xaa at position 21 is Ser, Pro, Lys, Ala, Thr or Arg
  VARIANT 24: note = MISC_FEATURE - Xaa at position 24 is Ala, Lys or Arg
  VARIANT 25: note = MISC_FEATURE - Xaa at position 25 is Glu or Gly
  VARIANT 34: note = MISC_FEATURE - Xaa at position 34 is Pro, Leu, Ile or Val
  VARIANT 39: note = MISC_FEATURE - Xaa at position 39 is Glu, Gln, Asn or Asp
  VARIANT 40: note = MISC_FEATURE - Xaa at position 40 is Ile, Val or Leu
  VARIANT 41: note = MISC_FEATURE - Xaa at position 41 is Val, Ala, Ile or Leu

SEQ ID NO: 696 - protein, 36 aa, synthetic construct; identical to SEQ ID NO: 673
  REGION 1..36: note = amino acid sequence motif
  VARIANT 1: note = MISC_FEATURE - Xaa at position 1 is Asp, Asn, Gln or Glu
  VARIANT 10: note = MISC_FEATURE - Xaa at position 10 is Gly, Asp or or Glu
  VARIANT 14: note = MISC_FEATURE - Xaa at position 14 is Ser, Asn, Thr or Gln
  VARIANT 20: note = MISC_FEATURE - Xaa at position 20 is Glu, Gly or Asp
  VARIANT 30: note = MISC_FEATURE - Xaa at position 30 is Ala or Gly

SEQ ID NO: 697 - protein, 50 aa, synthetic construct; identical to SEQ ID NO: 674
  REGION 1..50: note = amino acid sequence motif
  VARIANT 6: note = MISC_FEATURE - Xaa at position 6 is Ser, Ala or Thr
  VARIANT 8: note = MISC_FEATURE - Xaa at position 8 is Arg, Gln, Lys or Asn
  VARIANT 9: note = MISC_FEATURE - Xaa at position 9 is Ser or Thr
  VARIANT 11: note = MISC_FEATURE - Xaa at position 11 is Ile, Thr, Leu, Val or Ser
  VARIANT 12: note = MISC_FEATURE - Xaa at position 12 is Val, Ile or Leu
  VARIANT 21: note = MISC_FEATURE - Xaa at position 21 is Ile, Val or Leu
  VARIANT 28: note = MISC_FEATURE - Xaa at position 28 is Asp or Glu
  VARIANT 29: note = MISC_FEATURE - Xaa at position 29 is Glu, Gln, Asp or Asn
  VARIANT 31: note = MISC_FEATURE - Xaa at position 31 is Met, Leu, Ile or Val
  VARIANT 33: note = MISC_FEATURE - Xaa at position 33 is Phe or Pro
  VARIANT 37: note = MISC_FEATURE - Xaa at position 37 is Asp, Ala, Val, Glu, Ile or Leu
  VARIANT 41: note = MISC_FEATURE - Xaa at position 41 is Phe or Tyr
  VARIANT 42: note = MISC_FEATURE - Xaa at position 42 is Gln, His or Asn

SEQ ID NO: 698 - protein, 50 aa, synthetic construct; identical to SEQ ID NO: 675
  REGION 1..50: note = amino acid sequence motif
  VARIANT 2: note = MISC_FEATURE - Xaa at position 2 is His, Gln or Asn
  VARIANT 12: note = MISC_FEATURE - Xaa at position 12 is Ala, Val, Ile or Leu
  VARIANT 13: note = MISC_FEATURE - Xaa at position 13 is Asp or Asn
  VARIANT 17: note = MISC_FEATURE - Xaa at position 17 is His, Tyr or Phe
  VARIANT 23: note = MISC_FEATURE - Xaa at position 23 is His, Gln or Asn
  VARIANT 30: note = MISC_FEATURE - Xaa at position 30 is Arg, Ser, Lys or Thr
  VARIANT 31: note = MISC_FEATURE - Xaa at position 31 is Met, Ile, Leu or Val
  VARIANT 33: note = MISC_FEATURE - Xaa at position 33 is Ile, Leu or Val
  VARIANT 38: note = MISC_FEATURE - Xaa at position 38 is Met, Ile, Leu or Val
  VARIANT 39: note = MISC_FEATURE - Xaa at position 39 is Leu, Met, Ile or Val
  VARIANT 47: note = MISC_FEATURE - Xaa at position 47 is Met, Arg, Ile, Leu, Val or Lys

SEQ ID NO: 699 - protein, 45 aa, synthetic construct; identical to SEQ ID NO: 676
  REGION 1..45: note = amino acid sequence motif
  VARIANT 1: note = MISC_FEATURE - Xaa at position 1 is Val, Leu or Ile
  VARIANT 3: note = MISC_FEATURE - Xaa at position 3 is Arg, Gln, Lys or Asn
  VARIANT 21: note = MISC_FEATURE - Xaa at position 21 is Ser, Ala or Thr
  VARIANT 24: note = MISC_FEATURE - Xaa at position 24 is Asn, Asp, Gln or Glu
  VARIANT 26: note = MISC_FEATURE - Xaa at position 26 is Gly or Ala
  VARIANT 27: note = MISC_FEATURE - Xaa at position 27 is Glu, Gln, Asn or Asp
  VARIANT 29: note = MISC_FEATURE - Xaa at position 29 is Pro, Glu or Asp
  VARIANT 32: note = MISC_FEATURE - Xaa at position 32 is Glu, Gly or Asp
  VARIANT 33: note = MISC_FEATURE - Xaa at position 33 is Arg or Lys
  VARIANT 37: note = MISC_FEATURE - Xaa at position 37 is Val, Leu or Ile
  VARIANT 40: note = MISC_FEATURE - Xaa at position 40 is Phe, Leu, Ile or Val

SEQ ID NO: 700 - protein, 50 aa, synthetic construct; identical to SEQ ID NO: 677
  REGION 1..50: note = amino acid sequence motif
  VARIANT 2: note = MISC_FEATURE - Xaa at position 2 is Asp or Glu
  VARIANT 12: note = MISC_FEATURE - Xaa at position 12 is Ser, Ala or Thr
  VARIANT 18: note = MISC_FEATURE - Xaa at position 18 is Arg or Lys
  VARIANT 20: note = MISC_FEATURE - Xaa at position 20 is Gln, Gly, Glu, Asn or Asp
  VARIANT 23: note = MISC_FEATURE - Xaa at position 23 is Asn, Asp, Gln or Glu
  VARIANT 24: note = MISC_FEATURE - Xaa at position 24 is Thr, Asp, Ser or Glu
  VARIANT 25: note = MISC_FEATURE - Xaa at position 25 is Ala, Thr or Ser
  VARIANT 26: note = MISC_FEATURE - Xaa at position 26 is Ile, Phe, Leu or Val
  VARIANT 30: note = MISC_FEATURE - Xaa at position 30 is Asp or Glu
  VARIANT 32: note = MISC_FEATURE - Xaa at position 32 is Leu, Met, Ile or Val
  VARIANT 40: note = MISC_FEATURE - Xaa at position 40 is Asn, Ser, Asp, Gln, Glu or Thr
  VARIANT 41: note = MISC_FEATURE - Xaa at position 41 is Arg, Gly or Lys
  VARIANT 47: note = MISC_FEATURE - Xaa at position 47 is Gln, Arg, Asn or Lys

SEQ ID NO: 701 - protein, 50 aa, synthetic construct; identical to SEQ ID NO: 678
  REGION 1..50: note = amino acid sequence motif
  VARIANT 2: note = MISC_FEATURE - Xaa at position 2 is Val, Leu or Ile
  VARIANT 12: note = MISC_FEATURE - Xaa at position 12 is Ala, Val, Ile or Leu
  VARIANT 20: note = MISC_FEATURE - Xaa at position 20 is Ser, Asn, Thr or Gln
  VARIANT 28: note = MISC_FEATURE - Xaa at position 28 is Ala or Gly
  VARIANT 38: note = MISC_FEATURE - Xaa at position 38 is Gly, Gln or Asn
  VARIANT 49: note = MISC_FEATURE - Xaa at position 49 is Val, Ile or Leu

SEQ ID NO: 702 - protein, 50 aa, synthetic construct; identical to SEQ ID NO: 679
  REGION 1..50: note = amino acid sequence motif
  VARIANT 2: note = MISC_FEATURE - Xaa at position 2 is Gly, Asp or Glu
  VARIANT 3: note = MISC_FEATURE - Xaa at position 3 is Met or Ala
  VARIANT 4: note = MISC_FEATURE - Xaa at position 4 is Asn, Lys, Gln or Arg;
  VARIANT 7: note = MISC_FEATURE - Xaa at position 7 is Ile, Thr, Leu, Val or Ser
  VARIANT 9: note = MISC_FEATURE - Xaa at position 9 is Ile, Val or Leu
  VARIANT 10: note = MISC_FEATURE - Xaa at position 10 is Tyr or His
  VARIANT 11: note = MISC_FEATURE - Xaa at position 11 is Gly or Ala
  VARIANT 13: note = MISC_FEATURE - Xaa at position 13 is Lys, Glu, Arg or Asp
  VARIANT 15: note = MISC_FEATURE - Xaa at position 15 is Glu, Gln, Asp or Asn
  VARIANT 16: note = MISC_FEATURE - Xaa at position 16 is Arg, Val, Leu, Lys or Ile
  VARIANT 20: note = MISC_FEATURE - Xaa at position 20 is Leu, Tyr, Phe, Ile or Val
  VARIANT 21: note = MISC_FEATURE - Xaa at position 21 is Pro, Asn or Gln
  VARIANT 22: note = MISC_FEATURE - Xaa at position 22 is Ser, Asn, Gly, Thr or Gln
  VARIANT 23: note = MISC_FEATURE - Xaa at position 23 is Asn, Trp or Gln
  VARIANT 24: note = MISC_FEATURE - Xaa at position 24 is Ala, Ser, Pro or Thr
  VARIANT 25: note = MISC_FEATURE - Xaa at position 25 is Ile, Tyr, Leu or Val
  VARIANT 27: note = MISC_FEATURE - Xaa at position 27 is Ala, Gly, Val, Ile or Leu
  VARIANT 29: note = MISC_FEATURE - Xaa at position 29 is Trp, Glu or Asp
  VARIANT 31: note = MISC_FEATURE - Xaa at position 31 is Asp, Gln, Asn or Glu
  VARIANT 33: note = MISC_FEATURE - Xaa at position 33 is Cys, Ser or Thr
  VARIANT 34: note = MISC_FEATURE - Xaa at position 34 is Thr, Ile, Ser Leu or Val
  VARIANT 37: note = MISC_FEATURE - Xaa at position 37 is Ser, Ala, or Thr
  VARIANT 39: note = MISC_FEATURE - Xaa at position 39 is Arg, Phe, Met or Lys
  VARIANT 42: note = MISC_FEATURE - Xaa at position 42 is His, Val, Thr, Ile Leu or Ser
  VARIANT 43: note = MISC_FEATURE - Xaa at position 43 is Val, Phe, Ile or Leu
  VARIANT 44: note = MISC_FEATURE - Xaa at position 44 is Asn, Asp, Gln or Glu
  VARIANT 45: note = MISC_FEATURE - Xaa at position 45 is Ala, Glu, Arg, Asp or Lys
  VARIANT 48: note = MISC_FEATURE - Xaa at position 48 is Arg, Trp or Lys
  VARIANT 49: note = MISC_FEATURE - Xaa at position 49 is Ile, Val or Ile
  VARIANT 50: note = MISC_FEATURE - Xaa at position 50 is Ile, Arg, Leu, Val or Lys

SEQ ID NO: 703 - protein, 50 aa, synthetic construct; identical to SEQ ID NO: 680
  REGION 1..50: note = amino acid sequence motif
  VARIANT 1: note = MISC_FEATURE - Xaa at position 1 is Lys, Val, Arg, Ile or Leu
  VARIANT 2: note = MISC_FEATURE - Xaa at position 2 is Val, Lys, Arg, Ile or Leu
  VARIANT 3: note = MISC_FEATURE - Xaa at position 3 is Cys or Ala
  VARIANT 4: note = MISC_FEATURE - Xaa at position 4 is Arg, Gly, Cys or Lys
  VARIANT 5: note = MISC_FEATURE - Xaa at position 5 is Pro, His or Tyr
  VARIANT 9: note = MISC_FEATURE - Xaa at position 9 is Asp or Glu
  VARIANT 10: note = MISC_FEATURE - Xaa at position 9 is Asp or Glu
  VARIANT 11: note = MISC_FEATURE - Xaa at position 11 is Met, Val, Ile or Leu
  VARIANT 15: note = MISC_FEATURE - Xaa at position 15 is Ala or Gly
  VARIANT 16: note = MISC_FEATURE - Xaa at position 16 is Glu, Val, Asp, Ile or Leu
  VARIANT 19: note = MISC_FEATURE - Xaa at position 19 is Leu, Ile, Asn, Val or Gln
  VARIANT 22: note = MISC_FEATURE - Xaa at position 22 is Asn, Ser, Gln or Thr
  VARIANT 23: note = MISC_FEATURE - Xaa at position 23 is Asp, Lys, Glu or Arg
  VARIANT 27: note = MISC_FEATURE - Xaa at position 27 is Gln, Arg, Asn or Lys
  VARIANT 31: note = MISC_FEATURE - Xaa at position 31 is Lys, Asn, Arg or Gln
  VARIANT 34: note = MISC_FEATURE - Xaa at position 34 is Gln, His or Asn
  VARIANT 35: note = MISC_FEATURE - Xaa at position 35 is Leu, Met, Ile or Val
  VARIANT 39: note = MISC_FEATURE - Xaa at position 39 is Ala, Glu or Asp
  VARIANT 40: note = MISC_FEATURE - Xaa at position 40 is Pro, Ser, Ala or Thr

SEQ ID NO: 704 - protein, 36 aa, synthetic construct; identical to SEQ ID NO: 681
  REGION 1..36: note = amino acid sequence motif
  VARIANT 1: note = MISC_FEATURE - Xaa at position 1 is Pro, Asn or Gln
  VARIANT 3: note = MISC_FEATURE - Xaa at position 3 is Glu, Gln, Asp or Asn;
  VARIANT 6: note = MISC_FEATURE - Xaa at position 6 is Val, Ala, Thr, Ile, Leu or Ser
  VARIANT 10: note = MISC_FEATURE - Xaa at position 10 is Gly, Arg or Lys
  VARIANT 15: note = MISC_FEATURE - Xaa at position 15 is Ala or Gly
  VARIANT 16: note = MISC_FEATURE - Xaa at position 16 is Asn, Asp, Gln or Glu
  VARIANT 20: note = MISC_FEATURE - Xaa at position 20 is Ala, Thr or Ser
  VARIANT 21: note = MISC_FEATURE - Xaa at position 21 is Gln, His or Asn
  VARIANT 23: note = MISC_FEATURE - Xaa at position 23 is Asn, Ser, Gln or Thr
  VARIANT 27: note = MISC_FEATURE - Xaa at position 27 is Val, Leu, Ser, Ile or Thr
  VARIANT 30: note = MISC_FEATURE - Xaa at position 30 is Ile, Thr, Met, Ala, Leu, Val or Ser
  VARIANT 34: note = MISC_FEATURE - Xaa at position 34 is Pro, Gln or Asn
  VARIANT 35: note = MISC_FEATURE - Xaa at position 35 is Ser, Pro or Thr

SEQ ID NO: 705 - protein, 30 aa, synthetic construct; identical to SEQ ID NO: 682
  REGION 1..30: note = amino acid sequence motif
  VARIANT 1: note = MISC_FEATURE - Xaa at position 1 is Arg, Leu, Cys, Lys, Ile or Val
  VARIANT 2: note = MISC_FEATURE - Xaa at position 2 is Asp, Leu, Trp, Lys, Glu, Ile, Val or Arg
  VARIANT 3: note = MISC_FEATURE - Xaa at position 3 is Gln, Asn, Pro, Arg or Lys
  VARIANT 4: note = MISC_FEATURE - Xaa at position 4 is Met, Thr or Pro
  VARIANT 5: note = MISC_FEATURE - Xaa at position 5 is His, Gln or Arg
  VARIANT 6: note = MISC_FEATURE - Xaa at position 6 is Met, Ile, Leu or Val
  VARIANT 14: note = MISC_FEATURE - Xaa at position 14 is Ile, Val or Leu
  VARIANT 23: note = MISC_FEATURE - Xaa at position 23 is Ile, Thr, Leu, Val or Ser
  VARIANT 24: note = MISC_FEATURE - Xaa at position 24 is Asp, Gly or Glu
  VARIANT 26: note = MISC_FEATURE - Xaa at position 26 is Ser, Arg, Thr or Lys
  VARIANT 27: note = MISC_FEATURE - Xaa at position 27 is Gln, Phe, Arg, Asn or Lys
  VARIANT 28: note = MISC_FEATURE - Xaa at position 28 is Ala, Ser or Thr
  VARIANT 29: note = MISC_FEATURE - Xaa at position 29 is Thr, Ala, Asp, Glu or Ser
  VARIANT 30: note = MISC_FEATURE - Xaa at position 30 is Thr, Trp or Ser

SEQ ID NO: 706 - protein, 26 aa, synthetic construct
  REGION 1..26: note = amino acid sequence motif
  VARIANT 1: note = MISC_FEATURE - Xaa at position 1 is Thr or Ala
  VARIANT 2: note = MISC_FEATURE - Xaa at position 2 is Ser, Gly, Val, Thr, Ile or Leu
  VARIANT 3: note = MISC_FEATURE - Xaa at position 3 is Ile, Leu or Val
  VARIANT 6: note = MISC_FEATURE - Xaa at position 6 is Glu or Asp
  VARIANT 12: note = MISC_FEATURE - Xaa at position 12 is Ser, Asn, Thr or Gln
  VARIANT 15: note = MISC_FEATURE - Xaa at position 15 is Leu, Met, Ile or Val
  VARIANT 20: note = MISC_FEATURE - Xaa at position 20 is Thr or Ser
  VARIANT 22: note = MISC_FEATURE - Xaa at position 22 is Leu, His, Ile or Val
XXXPVXVVTDPXILXGMQTXVXIAEL

SEQ ID NO: 707 - protein, 26 aa, synthetic construct
  REGION 1..26: note = amino acid sequence motif
  VARIANT 5: note = MISC_FEATURE - Xaa at position 5 is Glu, Gln, Asn or Asp
  VARIANT 9: note = MISC_FEATURE - Xaa at position 9 is Arg, Glu, Lys or Asp
  VARIANT 13: note = MISC_FEATURE - Xaa at position 13 is Arg, Asn, Lys or Gln
  VARIANT 15: note = MISC_FEATURE - Xaa at position 15 is Val, Leu or Ile
  VARIANT 20: note = MISC_FEATURE - Xaa at position 20 is Lys, Ser, Arg or Thr
  VARIANT 21: note = MISC_FEATURE - Xaa at position 21 is Ala, Ser or Thr
  VARIANT 24: note = MISC_FEATURE - Xaa at position 24 is Met, Gln or Asn
  VARIANT 26: note = MISC_FEATURE - Xaa at position 26 is Ala or Gly
EGLRXFQNXQVAXAXFAVLXXVAXIX

SEQ ID NO: 708 - protein, 19 aa, synthetic construct
  REGION 1..19: note = amino acid sequence motif
  VARIANT 2: note = MISC_FEATURE - Xaa at position 2 is Thr or Ser
  VARIANT 12: note = MISC_FEATURE - Xaa at position 12 is Gln, His or Asn
  VARIANT 14: note = MISC_FEATURE - Xaa at position 14 is Ala, Val, Ile or Leu
  VARIANT 15: note = MISC_FEATURE - Xaa at position 15 is Gln, Lys, Asn or Arg
  VARIANT 17: note = MISC_FEATURE - Xaa at position 17 is Ala, Ser or Thr
  VARIANT 18: note = MISC_FEATURE - Xaa at position 18 is Ser, Met or Thr
  VARIANT 19: note = MISC_FEATURE - Xaa at position 19 is Gly, Asn or Gln
WXRVRIRHLEMXFXXEXXX

SEQ ID NO: 709 - protein, 19 aa, synthetic construct
  REGION 1..19: note = amino acid sequence motif
  VARIANT 2: note = MISC_FEATURE - Xaa at position 2 is Ile, Met, Leu or Val
  VARIANT 4: note = MISC_FEATURE - Xaa at position 4 is Glu, Gln, Asn or Asp
  VARIANT 8: note = MISC_FEATURE - Xaa at position 8 is Glu or Asp
  VARIANT 14: note = MISC_FEATURE - Xaa at position 14 is Leu, Met, Ile or Val
  VARIANT 15: note = MISC_FEATURE - Xaa at position 15 is Met, Ile, Leu or Val
  VARIANT 18: note = MISC_FEATURE - Xaa at position 18 is Ile, Met, Ile or Val
QXSXLQYXIWVQGXXRDXA

SEQ ID NO: 710 - protein, 14 aa, synthetic construct
  REGION 1..14: note = amino acid sequence motif
  VARIANT 1: note = MISC_FEATURE - Xaa at position 1 is Met, Leu, Val or Ile
  VARIANT 4: note = MISC_FEATURE - Xaa at position 4 is Ser, Lys, Thr or Arg
  VARIANT 5: note = MISC_FEATURE - Xaa at position 5 is Thr, Ser, Lys or Arg
  VARIANT 7: note = MISC_FEATURE - Xaa at position 7 is Tyr or Phe
  VARIANT 8: note = MISC_FEATURE - Xaa at position 8 is Arg, Glu, Lys or Asp
XDYXXLXXDLNQIS

SEQ ID NO: 711 - protein, 19 aa, synthetic construct
  REGION 1..19: note = amino acid sequence motif
  VARIANT 2: note = MISC_FEATURE - Xaa at position 2 is Arg, His, Gln, Lys or Asn
  VARIANT 4: note = MISC_FEATURE - Xaa at position 4 is Pro, Thr or Ser
  VARIANT 7: note = MISC_FEATURE - Xaa at position 7 is Gln, Lys, Asn or Arg
  VARIANT 11: note = MISC_FEATURE - Xaa at position 11 is Arg, Ile, Thr, Lys, Leu, Val or Ser
  VARIANT 12: note = MISC_FEATURE - Xaa at position 12 is Val, Gln, Leu, Ile or Asn
  VARIANT 13: note = MISC_FEATURE - Xaa at position 13 is Ile, Arg, Leu, Val or Lys
  VARIANT 15: note = MISC_FEATURE - Xaa at position 15 is Gln, Glu, Arg, Asn, Asp or Lys
  VARIANT 16: note = MISC_FEATURE - Xaa at position 16 is Asn, Phe or Gln
  VARIANT 17: note = MISC_FEATURE - Xaa at position 17 is Val, Arg, Ile, Leu or Lys
  VARIANT 18: note = MISC_FEATURE - Xaa at position 18 is Lys, Trp, Ser, Arg or Thr
  VARIANT 19: note = MISC_FEATURE - Xaa at position 19 is Ser, Glu, Thr or Asp
LXLXFMXLHAXXXEXXXXX

SEQ ID NO: 712 - protein, 14 aa, synthetic construct
  REGION 1..14: note = amino acid sequence motif
  VARIANT 2: note = MISC_FEATURE - Xaa at position 2 is Asp, Asn, Gln or Glu
  VARIANT 3: note = MISC_FEATURE - Xaa at position 3 is Ser, Ala or Thr
  VARIANT 5: note = MISC_FEATURE - Xaa at position 5 is Glu or Asp
  VARIANT 8: note = MISC_FEATURE - Xaa at position 8 is Gly, Ser or Thr
  VARIANT 9: note = MISC_FEATURE - Xaa at position 9 is Gln, His or Asn
  VARIANT 10: note = MISC_FEATURE - Xaa at position 10 is Ile, Leu or Val
  VARIANT 12: note = MISC_FEATURE - Xaa at position 12 is Gly, Asp or Glu
VXXLXQVXXXVXAP

SEQ ID NO: 713 - skipped

SEQ ID NO: 714 - protein, 10 aa, synthetic construct
  REGION 1..10: note = amino acid sequence motif
  VARIANT 5: note = MISC_FEATURE - Xaa at position 5 is Glu, Gln, Asp or Asn
  VARIANT 9: note = MISC_FEATURE - Xaa at position 9 is Glu, Gln, Asp, His or Asn
TLTNXPSEXF

SEQ ID NO: 715 - protein, 10 aa, synthetic construct
  REGION 1..10: note = amino acid sequence motif
  VARIANT 3: note = MISC_FEATURE - Xaa at position 3 is Arg, Ser, Lys or Thr
  VARIANT 6: note = MISC_FEATURE - Xaa at position 6 is Arg, Thr, Lys or Ser
  VARIANT 8: note = MISC_FEATURE - Xaa at position 8 is Ile, Val or Ile
LPXQSXNXSF

SEQ ID NO: 716 - protein, 886 aa, Polypodium sp.
  source 1..886: note = Polypodium punctatum
MEYSSLYGDVNQVSLRFQNMEFSEVMVVHRMHVRLEELDMTGLEGIEKVKRLYVLADVVELPSTATQVFQYLRLPASISAIILCRVLYIPEVDQRPHMAQCSLDFPFMRLHVVGSAHENGGGVMQAFSSDATPSNIGIYFHADRFIYRQATSSASNFVLPLDVRVSFGSSTFSAPTLRPDWQNLNVSNIQYGPQHLSRGPPLTSSDSDLQRSDEIELLAQQDVWSPLLHVAFSPNAPPGNIPGTQGIFRPSSACSFFHVPPPDVPANVLTDPSIILGMQMNMLIAELVLAAHNSPQVMNVITKHVLWLNKILLQVASPNDDILALLFRIQAFMKMAKEPRFVVPRLQYHMYGSLINRMVQVAQNYDQEFKQLKLFIAQNKILGSYLLQQNRAFAEREREMSAFHSQVVSMRRSELQSAIQTMDNLSLQMESESEAMNEAQENMVEAIQEYERKLLARALFSVIGAIASVALAFATGGATAPGAVAAAGGAVAAAGRLAAGLQKVVDILQGLQAVMEVVVAIRDIVESLKNMGQLVEAPEMPEMPTDADWLIFVNEVEAVAEQVPTEVAEVPVWKAKCKNVAVLGQAMCTTAAYISELQYQITVEEMLQEIAQRQADRLVGISAADLSSYTEMASQIDMRTTRILLELIKMLYIQNAAIKYEYLYDANEKLNSWPVSMETVWTMLLQQENAALLGLLDLGPTNDFTVTYAVKDIPTKLLVDGFDWNFEIAVEDFAIFPSGLSRVRIRYVELKFDQQGADSSNIVIHQPSTNTGLVYMLLQGSRFVHDRKRQEVMDYEASTGPVYAYAYDLNTGATTLNNIPSQQQANTFMQMTPFNAWRLRLSASAAENQGLVFPTATSPDNTTQISITFYVTAIRRIDLRQEGDVE

SEQ ID NO: 717 - DNA, 2658 bp, Polypodium sp.
  source 1..2658: mol_type = unassigned DNA; note = Polypodium punctatum
atggagtatagcagcttgtatggtgatgtgaaccaagtgagcctgaggttccagaacatggagttctctgaggtcatggtggtgcatcggatgcatgtgcgcctggaggagcttgacatgacggggttggagggcatcgagaaggtgaaacgcctgtacgtgctggcggacgtggtggagctgccttccacagccacccaggtgtttcagtatctgcgccttcccgcctccatttcagctattatcctctgccgcgttctctatatccctgaagttgatcagaggccccacatggctcaatgctcgctcgacttcccgtttatgcgcctccatgtcgtcggatctgcacacgagaacggtgggggtgttatgcaagccttttcctccgacgccacccccagcaatattggcatctacttccatgctgaccgattcatctaccgccaggccacatcttcggccagcaactttgtcttgcccctggatgtaagggtcagctttggcagctctaccttctcggccccaaccctccgtcccgactggcaaaaccttaatgtctccaacatccagtacgggccgcagcatttgtccaggggcccacccctcacatcctcagactctgacttgcaaagatctgacgagatcgagctcctggcgcagcaagatgtttggagccctcttttacatgtcgcgttcagcccgaatgcaccacctggcaacatcccgggtacacaaggaattttccgaccctcctctgcatgcagctttttccatgtgccgccaccggatgtccctgcgaatgtgctcactgatccttccatcatcttgggcatgcaaatgaacatgctcattgctgagcttgtcttggctgctcacaattcgccgcaggtcatgaacgtcatcactaagcatgtgctatggctcaacaagatcttgcttcaggttgcttcacccaatgatgatattttagcactcttgtttcgtatccaagcattcatgaagatggcaaaggaaccgcggtttgtggttccacggttgcagtaccacatgtacggtagccttatcaatcgaatggtgcaagtagcccagaattatgaccaggagttcaagcaactgaagcttttcatcgcacaaaataagattttgggaagctatttgctacaacaaaatagggcttttgcagaaagggagagggaaatgagtgcttttcactcgcaagtcgtatcgatgaggagatctgagctgcagtctgccatacaaacaatggacaatttgagtttgcaaatggaatcagagagtgaggcgatgaacgaagcccaggagaacatggttgaagcaattcaagagtatgaaaggaaattacttgcaagagctctattttctgtgattggggcaatagcaagcgtcgctcttgcatttgccactggtggtgcaactgcaccaggggcagtggcagcagctggaggggctgttgctgcagcagggaggttggcagcagggctccaaaaggttgtggacatcctacaaggcttgcaagcagtcatggaggttgtggtagccataagagacatcgtagaatcattgaaaaacatgggtcaactagtagaagctcccgagatgccagagatgccaacggatgcggactggttaatttttgtaaatgaggtggaggcagtggcagagcaagtgccaacagaagtggcagaggtcccagtgtggaaggcgaagtgcaagaatgtggctgtgctagggcaagcaatgtgcaccacagcagcatatattagtgagctacagtatcagatcacggtggaagagatgctacaagagattgcacaacgccaagcagacaggttggtggggatatcagcagcagatctatcgagctacacagagatggcatcgcaaatagacatgcgtacaacccgaatcctccttgagctcatcaagatgttgtacattcaaaatgcagcaattaagtatgagtacttgtatgatgctaatgagaagcttaattcatggccagtgagcatggagactgtatggaccatgctcttgcaacaagagaatgcagctctcttgggcttgctagacttggggcccaccaatgatttcactgtaacctatgctgtgaaagatatacctaccaagttgttagtagatgggtttgattggaattttgagatcgcggtggaggattttgcaatctttccatcaggattgtctcgtgttcgcatacgatatgttgagcttaaatttgaccaacaaggtgctgatagtagtaacattgtcatccaccagcctagcactaacactggcttagtctacatgctcttacaaggctcccggttcgtccatgaccgcaaacgtcaggaggtgatggactatgaggcaagcacgggacctgtatatgcatatgcctatgacctcaacactggtgcaaccactctcaacaacatcccctcacagcaacaggccaacacatttatgcaaatgacacccttcaatgcttggagacttcgcctctctgcctctgctgccgaaaatcagggattggtgtttcctacagcaacttctccggacaatactacccaaatttccatcacattctatgtcactgctattcgacgcatagatcttcgacaagagggtgatgtggag

SEQ ID NO: 718 - DNA, 2598 bp, synthetic construct
  misc_feature 1..2598: note = encodes PtIP-83 polypeptide variant
  source 1..2598: mol_type = other DNA
atggctctcgtggattacggcaagcttttcgaggatctgaaccagataagcatgggtgtactggatcgggtagagttttcagaggtgatggtgatccacaggatgtatgtgaggctagctgatctgaatgtggggcagctcgagggagccgagaaagtgaagcggttgtatgtgtttgcggacgtggtggagctaccagtcgtggaatggcggtggccgccgcaaataccaggatcggtgacggtgatcatattgtgtcgtcttcttcaatggccaactgatgggaggcagtcggacaccgagctccacctgacattcatgaagttgcatgccatacaacgagaggaaaatcggtgggagataaccgcagcagatggcatgaactggggagtttacatacacgcagaggaagtacaggttggcgtgctgacaatgtcatggtcttcggtacttagagtttcggcacttcgctctgttataacctccggctttcgcgccgttagtgtgtttgaggtaccgggaagtgtaaggtccacccttggagctactttaaggcccgatcacgccttatatagtacaactatgcaagccacacccaacgcatcgcatattagtgcttttaaccttcgcatagtttccccgtcggcatatcgtgtttgtcctctccaaaatgacacagatacctacttaggtattccagcagacgtggcggcagttcttccagtagacgtggtgactgatcctaacatcttgctgggcatgcagacaacggtacacattgcggagctagtcaaggcatgtcatccgtcacccgatgttgtgagcgctgtaggggagcacctgaactggctcaacaaactcttactcccacttaaggaatcgactcagttgcaagggaccgaggcctacaacgagtgccttgcgcttttaggtcgcattcaatgtgtcatgaagatggggccgtttgtctcggtagtgccgcagctgcaatacagaatgtatggtagcctcatcagacaaatggcccaggtagcacagaactacgaccaagatttcaggcagctcaagttattcattgcccaaaaccaaatccttggcagctatttgctgcagcagaacaaggcctttgctgacagagaggtgcagatggagagctttcattcagcggtcatttctcaaagaaggcaggagttggacgacgccatcgctaagatggaccgactgagcttgcagatggaggaagaggacagagcaatggagcaagcccgaaaagaaatggaagaaggattgaagcagttccagaatgagcaagttgcaagggctgtgttcgctgttcttaaatctgtagctatgattgcgctcgcattcgtcacggctggtgcaacggctcctggggctgcagcatctgcagcgcaagctgtgaacatagccggtcaagcggcacaagctctgcgaagggtggtggaaattctagaggggctcgaggctgtgatggaggttgtggctgctataaagcaccttgtggatgctctggaccaggtaagtcagattgtggatgcaccacctatgccagacatgccctcggaggcggactggagtatttttgtgaatgagattgaagccgtggcagaggggatgccgacggaagtctcggaggttccggcgtggaaggccaagtgcaagaatgtggctgcactgggtagggagatgtgcatcacggcagaacagatttcccagctccagtatgacatctgggtgcaaggcttgttgcgggatatagctcaaagccacgcagaccggctggcagcgattcaacctgctaatcttaccaactatttggagatggcaatacagatggatatgcggactacgaggatactgatagggctcctcaacataatgcgcatccagaatgcggcacttatgtatgagtaccttctaacgcccacgcagctcactgcatggccgctgagaatggatactgtggccaacttgctcatcacgcacgagagtgctgcactgtcaggattagctcagttagggcccccatcggacttcacgagcaggcatgtagtgaaaggcatacctgtgagcttgcttctagacggtggggattgggaatttgagattcctgtgcaaggtggcatgtccagtttcccttccagctggactcgagtgcggattcggcacctggagatgcactttgtgcaggaggcgagcggtggcggcgagattatccaccagcctgccacccagacggggaccatttacatcctcctgcagggctccactgtcttccatgatcgcagaagggaggaggtgatgacctttcaggcagcggttccgctcaactaccattacgcgtaccgcctcgacactggagaagccactcttacgaacgagccctcggaacagtttgccaacacattcatgcagatgacaccgttcactcactggaggctacgtctgtctgcgtccgcagcggagaataaaggattagcctttcccacagctacagctcccgactccaccactgagattgccatcactttccatgttacggccattagacaaattgactggcggcaagaggaggag

SEQ ID NO: 719 - DNA, 2598 bp, synthetic construct
  misc_feature 1..2598: note = encodes PtIP-83 polypeptide variant
  source 1..2598: mol_type = other DNA
atggctctcgtggattacggcaagcttttcgaggatctgaaccagataagcatgggtgtactggatcgggtagagttttcagaggtgatggtgatccacaggatgtatgtgaggctagctgatctgaatgtggggcagctcgagggagccgagaaagtgaagcggttgtatgtgtttgcggacgtggtggagctaccagtcgtggaatggcggtggccgccgcaaataccaggatcggtgacggtgatcatattgtgtcgtcttcttcaatggccaactgatgggaggcagtcggacaccgagctccacctgacattcatgaagttgcatgccatacaacgagaggaaaatcggtgggagataaccgcagcagatggcatgaactggggagtttacatacacgcagaggaagtacaggttggcgtgctgacaatgtcatggtcttcggtacttagagtttcggcacttcgctctgttataacctccggctttcgcgccgttagtgtgtttgaggtaccgggaagtgtaaggtccacccttggagctactttaaggcccgatcacgccttatatagtacaactatgcaagccacacccaacgcatcgcatattagtgcttttaaccttcgcatagtttccccgtcggcatatcgtgtttgtcctctccaaaatgacacagatacctacttaggtattccagcagacgtggcggcagttcttccagtagacgtggtgactgatcctaacatcttgctgggcatgcagacaacggtacacattgcggagctagtcaaggcatgtcatccgtcacccgatgttgtgagcgctgtaggggagcacctgaactggctcaacaaactcttactcccacttaaggaatcgactcagttgcaaggaagcgagtcgtacaaggagtgccttgcactcttgggtcgtgttcatgctgcgatgaagatggggccgtttgtctcggtagtgccgcagctgcaatacagaatgtatggtagcctcatcagacaaatggcccaggtagcacagaactacgaccaagatttcaggcagctcaagttattcattgcccaaaaccaaatccttggcagctatttgctgcagcagaacaaggcctttgctgacagagaggtgcagatggagagctttcattcagcggtcatttctcaaagaaggcaggagttggacgacgccatcgctaagatggaccgactgagcttgcagatggaggaagaggacagagcaatggagcaagcccgaaaagaaatggaagaaggattgaagcagttccagaatgagcaagttgcaagggctgtgttcgctgttcttaaatctgtagctatgattgcgctcgcattcgtcacggctggtgcaacggctcctggggctgcagcatctgcagcgcaagctgtgaacatagccggtcaagcggcacaagctctgcgaagggtggtggaaattctagaggggctcgaggctgtgatggaggttgtggctgctataaagcaccttgtggatgctctggaccaggtaagtcagattgtggatgcaccacctatgccagacatgccctcggaggcggactggagtatttttgtgaatgagattgaagccgtggcagaggggatgccgacggaagtctcggaggttccggcgtggaaggccaagtgcaagaatgtggctgcactgggtagggagatgtgcatcacggcagaacagatttcccagctccagtatgacatctgggtgcaaggcttgttgcgggatatagctcaaagccacgcagaccggctggcagcgattcaacctgctaatcttaccaactatttggagatggcaatacagatggatatgcggactacgaggatactgatagggctcctcaacataatgcgcatccagaatgcggcacttatgtatgagtaccttctaacgcccacgcagctcactgcatggccgctgagaatggatactgtggccaacttgctcatcacgcacgagagtgctgcactgtcaggattagctcagttagggcccccatcggacttcacgagcaggcatgtagtgaaaggcatacctgtgagcttgcttctagacggtggggattgggaatttgagattcctgtgcaaggtggcatgtccagtttcccttccagctggactcgagtgcggattcggcacctggagatgcactttgtgcaggaggcgagcggtggcggcgagattatccaccagcctgccacccagacggggaccatttacatcctcctgcagggctccactgtcttccatgatcgcagaagggaggaggtgatgacctttcaggcagcggttccgctcaactaccattacgcgtaccgcctcgacactggagaagccactcttacgaacgagccctcggaacagtttgccaacacattcatgcagatgacaccgttcactcactggaggctacgtctgtctgcgtccgcagcggagaataaaggattagcctttcccacagctacagctcccgactccaccactgagattgccatcactttccatgttacggccattagacaaattgactggcggcaagaggaggag

SEQ ID NO: 720 - DNA, 2563 bp, synthetic construct
  misc_feature 1..2563: note = encodes PtIP-83 polypeptide variant
  source 1..2563: mol_type = other DNA
atggattacagcacgctttacagggatctgaaccagataagcatgcccctggatcgggtagagttctcagaggtgatggtaatccacaggatgtacttgaggttatctgatctgaatgtgggggagctccccggagccgagagggtgaagcggttgtatgtgttggcagacgtggtggagctcgcaacatttgcgcatccacagttgcttaatacgcggatgccaggatcggtgacggtgatcattctgtgtcgtcttcttcagtttccaactgatgggtcgttcgctgcttggctcgagctgccgttcatggagttgcacacactcatagaacaatacaggtcagagataaaagcagcagatgacgcgaaatggggaacgtatgtacacgcggaggaagtacagctcagcccgctgtttaatgggtggccttatctggttgttgaggcacagcgctgtattataaccgcggccatgcacaatacatttaaccgccctgggtgggttcgctccattactcaatttacaactgatcagtccggtcgggtagataccacactgctcgcacgaacagaattcggccatattgatctaccactcgaaacagattccccaacggcattcagtgtttcacaccgccaaagtacgaatttgcccgtagagtacaccggtattccagtggaggtggtgaccgatcctaacatcttgatgggcatgcaaaccagcgtgcacattgcggagctagtgaaggcatgttacccgtcaccagaattagtgagcgctgtaggggtgcacgtgaattggctcaacgaagtcttgctccgagttgtccagaaggaatctcagttgcaaggaagcgagtcgtacaaggagtgccttgcactcttgggtcgtgttcacgctgcgatgaagatggtgagaattggcttagtagtgccccagctgcaatacagaatgtacggtagcctcatcaaccaaatggcccaagtagcacaaaactacgaccgagaattcaagcaattcaaattattcatcatccaaaatcaaatccttggcagctatttgctgcagcagaacagggcatttgctgagagggagctgcagatggagagctttcatgctgctgtcatttctcaaagaagggaggagttggacaatacattcgcaaagatggaccgattgagcgggcaaatggaggcagagagtagtgcaatggagcaagccaaaaaggaaatggacgaaggattgaggcagttccagaataggcaagttgcgaacgccctctttgccgttcttagcgctgtagctcagattgggcttgcattccttacggctggtgcaacggctcctggagctgtggcgtcggcggggcaagctgtgagcatagcaggtcaggcggcgcaaggtctgcgaagggtggtggaaattctagagcagctggaggctgtgatggaggttgtggctgctgtgaaggacctcgtggattcattggaacaggtaggtcagattgtggacgcaccggtgatgccggaattgccctcagaggcggactggtccatttttgtgaacgaggtggaggccgtggcagagggcatgccaacggaagtctcggaggttccggtgtggagggccaagtgcaagaatgtggctgcactgggtcgggagatgagcatcacggcagtacagatgtcggagctgcagtatgacatctgggtgcaaggcatgatgcgggatatggctcgaagccaggcagacaggctggccgcaattcaacccgcggaccttaccaactatttggagatggctacccagatggatatgcggactacgaggatgctgctggggctcctcaacatattgcgcatccagaatgcggcgctcaggtacgagtatcttctaatgcccacggagctcacaacatggccactgggtatggataccgtgggtgacttgctcatcgcgcaggagaatgctgcactgataggattaatgcagctagggccctcatctgatttcacgagcaggcatgtggtgaaagacatacctgtgaacttgctgctcgatggcgaggattgggagtttgagattcctgtgcaagctggcatgtccagcttcccttccagctggtctcgcgtccgtattcggcacctggagatgcactttgtgaaggaggccagcggtattggtggtgagattatccaccagcctaccacccagactgggaccgtttacatccttctgcagggttccactatcttccatgaccgcagaagagaccaggtgttgccttttcaggccgctgctccgctcaactaccattacgcgtaccgcctcgacaccggcgactccactctcacaaacgaaccctctgaacagtttgccaacaagttcatgcagatgacacccttcacccgttggaggcttcgtctgtctgcgtccgcaaaagagaatgcaggattagcctttcccacggctacagcacttgactccactacccagattgtcatcactttccatgttacggccatcagacaaattgactggcggcacgacgaagagtagc

SEQ ID NO: 721 - DNA, 2601 bp, synthetic construct
  misc_feature 1..2601: note = encodes PtIP-83 polypeptide variant
  source 1..2601: mol_type = other DNA
atggctctcgtggattacggcaagcttttcgaggatctgaaccagataagcatgggtgtactggatcgggtagagttttcagaggtgatggtgatccacaggatgtatgtgaggctagctgatctgaatgtggggcagctcgagggagccgagaaagtgaagcggttgtatgtgtttgcggacgtggtggagctaccagtcgtggaatggcggtggccgccgcaaataccaggatcggtgacggtgatcatattgtgtcgtcttcttcaatggccaactgatgggaggcagtcggacaccgagctccacctgacattcatgaagttgcatgccatacaacgagaggaaaatcggtgggagataaccgcagcagatggcatgaactggggagtttacatacacgcagaggaagtacaggttggcgtgctgacaatgtcatggtcttcggtacttagagtttcggcacttcgctctgttataacctccggctttcgcgccgttagtgtgtttgaggtaccgggaagtgtaaggtccacccttggagctactttaaggcccgatcacgccttatatagtacaactatgcaagccacacccaacgcatcgcatattagtgcttttaaccttcgcatagtttccccgtcggcatatcgtgtttgtcctctccaaaatgacacagatacctacttaggtattccagcagacgtggcggcagttcttccagtagacgtggtgactgatcctaacatcttgctgggcatgcagacaacggtacacattgcggagctagtcaaggcatgtcatccgtcacccgatgttgtgagcgctgtaggggagcacgtgaattggctcaacgaagtcttgctccgagttgtccagaaggaatctcagttgcaagggaccgaggcctacaacgagtgccttgcgcttttaggtcgcattcaatgtgtcatgaagatggggccgtttgtctcggtagtgccgcagctgcaatacagaatgtatggtagcctcatcagacaaatggcccaggtagcacagaactacgaccaagatttcaggcagctcaagttattcattgcccaaaaccaaatccttggcagctatttgctgcagcagaacaaggcctttgctgacagagaggtgcagatggagagctttcattcagcggtcatttctcaaagaaggcaggagttggacgacgccatcgctaagatggaccgactgagcttgcagatggaggaagaggacagagcaatggagcaagcccgaaaagaaatggaagaaggattgaagcagttccagaatgagcaagttgcaagggctgtgttcgctgttcttaaatctgtagctatgattgcgctcgcattcgtcacggctggtgcaacggctcctggggctgcagcatctgcagcgcaagctgtgaacatagccggtcaagcggcacaagctctgcgaagggtggtggaaattctagaggggctcgaggctgtgatggaggttgtggctgctataaagcaccttgtggatgctctggaccaggtaagtcagattgtggatgcaccacctatgccagacatgccctcggaggcggactggagtatttttgtgaatgagattgaagccgtggcagaggggatgccgacggaagtctcggaggttccggcgtggaaggccaagtgcaagaatgtggctgcactgggtagggagatgtgcatcacggcagaacagatttcccagctccagtatgacatctgggtgcaaggcttgttgcgggatatagctcaaagccacgcagaccggctggcagcgattcaacctgctaatcttaccaactatttggagatggcaatacagatggatatgcggactacgaggatactgatagggctcctcaacataatgcgcatccagaatgcggcacttatgtatgagtaccttctaacgcccacgcagctcactgcatggccgctgagaatggatactgtggccaacttgctcatcacgcacgagagtgctgcactgtcaggattagctcagttagggcccccatcggacttcacgagcaggcatgtagtgaaaggcatacctgtgagcttgcttctagacggtggggattgggaatttgagattcctgtgcaaggtggcatgtccagtttcccttccagctggactcgagtgcggattcggcacctggagatgcactttgtgcaggaggcgagcggtggcggcgagattatccaccagcctgccacccagacggggaccatttacatcctcctgcagggctccactgtcttccatgatcgcagaagggaggaggtgatgacctttcaggcagcggttccgctcaactaccattacgcgtaccgcctcgacactggagaagccactcttacgaacgagccctcggaacagtttgccaacacattcatgcagatgacaccgttcactcactggaggctacgtctgtctgcgtccgcagcggagaataaaggattagcctttcccacagctacagctcccgactccaccactgagattgccatcactttccatgttacggccattagacaaattgactggcggcaagaggaggag

SEQ ID NO: 722 - DNA, 2550 bp, synthetic construct
  misc_feature 1..2550: note = encodes PtIP-83 polypeptide variant
  source 1..2550: mol_type = other DNA
atggattacagcacgctttacagggatctgaaccagataagcatgcccctggatcgggtagagttctcagaggtgatggtaatccacaggatgtacttgaggttatctgatctgaatgtggggcagctcgagggagccgagagggtgaagcggttgtatgtgtttgcggacgtggtggagctaccagtcgtggaatggcggtggccgccgcaaataccaggatcggtgacggtgatcatattgtgtcgtcttcttcagtttccaactgatgggtcgttcgctgcttggctcgggctgccgttcatggagttgcacacactcatagaacaatacaggtcagagataaaagcagcagatgacgcgaaatggggaacgtatgtacacgcggaggaagtacagctcagcccgctgtttaatgggtggccttatctggttgttgaggcacagcgctgtattataaccgcggccatgcacaatacatttaaccgccctgggtgggttcgctccattactcaatttacaactgatcagtccggtcgggtagataccacactgctcgcacgaacagaattcggccatattgatctaccactcgaaacagattccccaacggcattcagtgtttcacaccgccaaagtacgaatttgcccgtagagtacaccggtattccagtggaggtggtgaccgatcctaacatcttgatgggcatgcaaaccagcgtgcacattgcggagctagtgaaggcatgttacccgtcaccagaattagtgagcgctgtaggggtgcacgtgaattggctcaacgaagtcttgctccgagttgtccagaaggaatctcagttgcaagggaccgaggcctacaacgagtgccttgcgcttttaggtcgcattcaatgtgtcatgaagatggggccgtttgtctcggtagtgccgcagctgcaatacagaatgtatggtagcctcatcagacaaatggcccaggtagcacagaactacgaccaagatttcaggcagctcaagttattcattgcccaaaaccaaatccttggcagctatttgctgcagcagaacaaggcctttgctgacagagaggtgcagatggagagctttcattcagcggtcatttctcaaagaaggcaggagttggacgacgccatcgctaagatggaccgactgagcttgcagatggaggaagaggacagagcaatggagcaagcccgaaaagaaatggaagaaggattgaagcagttccagaatgagcaagttgcaagggctgtgttcgctgttcttaaatctgtagctatgattgcgctcgcattcgtcacggctggtgcaacggctcctggggctgcagcatctgcagcgcaagctgtgaacatagccggtcaagcggcacaagctctgcgaagggtggtggaaattctagaggggctcgaggctgtgatggaggttgtggctgctataaagcaccttgtggatgctctggaccaggtaagtcagattgtggatgcaccacctatgccagacatgccctcggaggcggactggagtatttttgtgaatgagattgaagccgtggcagaggggatgccgacggaagtctcggaggttccggcgtggaaggccaagtgcaagaatgtggctgcactgggtagggagatgtgcatcacggcagaacagatttcccagctccagtatgacatctgggtgcaaggcttgttgcgggatatagctcaaagccacgcagaccggctggcagcgattcaacctgctaatcttaccaactatttggagatggcaatacagatggatatgcggactacgaggatactgatagggctcctcaacataatgcgcatccagaatgcggcacttatgtatgagtaccttctaacgcccacgcagctcactgcatggccgctgagaatggatactgtggccaacttgctcatcacgcacgagagtgctgcactgtcaggattagctcagttagggcccccatcggacttcacgagcaggcatgtagtgaaaggcatacctgtgagcttgcttctagacggtggggattgggaatttgagattcctgtgcaaggtggcatgtccagtttcccttccagctggactcgagtgcggattcggcacctggagatgcactttgtgcaggaggcgagcggtggcggcgagattatccaccagcctgccacccagacggggaccatttacatcctcctgcagggctccactgtcttccatgatcgcagaagggaggaggtgatgacctttcaggcagcggttccgctcaactaccattacgcgtaccgcctcgacactggagaagccactcttacgaacgagccctcggaacagtttgccaacacattcatgcagatgacaccgttcactcactggaggctacgtctgtctgcgtccgcagcggagaataaaggattagcctttcccacagctacagctcccgactccaccactgagattgccatcactttccatgttacggccattagacaaattgactggcggcaagaggaggag

SEQ ID NO: 723 - DNA, 2589 bp, synthetic construct
  misc_feature 1..2589: note = encodes PtIP-83 polypeptide variant
  source 1..2589: mol_type = other DNA
atggattacagcacgctttacagggatctgaaccagataagcatgcccctggatcgggtagagttctcagaggtgatggtaatccacaggatgtacttgaggttatctgatctgaatgtgggggagctccccggagccgagagggtgaagcggttgtatgtgtttgcggacgtggtggagctaccagtcgtggaatggcggtggccgccgcaaataccaggatcggtgacggtgatcattctgtgtcgtcttcttcaatggccaactgatgggaggcagtcggacaccgagctccacctgacattcatgaagttgcatgccatacaacgagaggaaaatcggtgggagataaccgcagcagatggcatgaactggggagtttacatacacgcagaggaagtacaggttggcgtgctgacaatgtcatggtcttcggtacttagagtttcggcacttcgctctgttataacctccggctttcgcgccgttagtgtgtttgaggtaccgggaagtgtaaggtccacccttggagctactttaaggcccgatcacgccttatatagtacaactatgcaagccacacccaacgcatcgcatattagtgcttttaaccttcgcatagtttccccgtcggcatatcgtgtttgtcctctccaaaatgacacagatacctacttaggtattccagcagacgtggcggcagttcttccagtagacgtggtgaccgatcctaacatcttgatgggcatgcaaaccagcgtgcacattgcggagctagtcaaggcatgtcatccgtcacccgatgttgtgagcgctgtaggggtgcacgtgaattggctcaacgaagtcttgctccgagttgtccagaaggaatctcagttgcaagggaccgaggcctacaacgagtgccttgcgcttttaggtcgcattcaatgtgtcatgaagatggggccgtttgtctcggtagtgccgcagctgcaatacagaatgtatggtagcctcatcagacaaatggcccaggtagcacagaactacgaccaagatttcaggcagctcaagttattcattgcccaaaaccaaatccttggcagctatttgctgcagcagaacaaggcctttgctgacagagaggtgcagatggagagctttcattcagcggtcatttctcaaagaaggcaggagttggacgacgccatcgctaagatggaccgactgagcttgcagatggaggaagaggacagagcaatggagcaagcccgaaaagaaatggaagaaggattgaagcagttccagaatgagcaagttgcaagggctgtgttcgctgttcttaaatctgtagctatgattgcgctcgcattcgtcacggctggtgcaacggctcctggggctgcagcatctgcagcgcaagctgtgaacatagccggtcaagcggcacaagctctgcgaagggtggtggaaattctagaggggctcgaggctgtgatggaggttgtggctgctataaagcaccttgtggatgctctggaccaggtaagtcagattgtggatgcaccacctatgccagacatgccctcggaggcggactggagtatttttgtgaatgagattgaagccgtggcagaggggatgccgacggaagtctcggaggttccggcgtggaaggccaagtgcaagaatgtggctgcactgggtagggagatgtgcatcacggcagaacagatttcccagctccagtatgacatctgggtgcaaggcttgttgcgggatatagctcaaagccacgcagaccggctggcagcgattcaacctgctaatcttaccaactatttggagatggcaatacagatggatatgcggactacgaggatactgatagggctcctcaacataatgcgcatccagaatgcggcacttatgtatgagtaccttctaacgcccacgcagctcactgcatggccgctgagaatggatactgtggccaacttgctcatcacgcacgagagtgctgcactgtcaggattagctcagttagggcccccatcggacttcacgagcaggcatgtagtgaaaggcatacctgtgagcttgcttctagacggtggggattgggaatttgagattcctgtgcaaggtggcatgtccagtttcccttccagctggactcgagtgcggattcggcacctggagatgcactttgtgcaggaggcgagcggtggcggcgagattatccaccagcctgccacccagacggggaccatttacatcctcctgcagggctccactgtcttccatgatcgcagaagggaggaggtgatgacctttcaggcagcggttccgctcaactaccattacgcgtaccgcctcgacactggagaagccactcttacgaacgagccctcggaacagtttgccaacacattcatgcagatgacaccgttcactcactggaggctacgtctgtctgcgtccgcagcggagaataaaggattagcctttcccacagctacagctcccgactccaccactgagattgccatcactttccatgttacggccattagacaaattgactggcggcaagaggaggag

SEQ ID NO: 724 - DNA, 2608 bp, synthetic construct
  misc_feature 1..2608: note = encodes PtIP-83 polypeptide variant
  source 1..2608: mol_type = other DNA
atggctctcgtggattacggcaagcttttcgaggatctgaaccagataagcatgggtgtactggatcgggtagagttttcagaggtgatggtgatccacaggatgtatgtgaggctagctgatctgaatgtggggcagctcgagggagccgagaaagtgaagcggttgtatgtgtttgcagacgtggtggagctaccagtcgtggaatggcggtggccgccgcaaataccaggatcggtgacggtgatcatattgtgtcgtcttcttcaatggccaactgatgggaggcagtcggacaccgagctccacctgacattcatgaagttgcatgccatacaacgagaggaaaatcggtgggagataaccgcagcagatggcatgaactggggagtttacatacacgcagaggaagtacaggttggcgtgctgacaatgtcatggtcttcggtacttagagtttcggcacttcgctctgttataacctccggctttcgcgccgttagtgtgtttgaggtaccgggaagtgtaaggtccacccttggagctactttaaggcccgatcacgccttatatagtacaactatgcaagccacacccaacgcatcgcatattagtgcttttaaccttcgcatagtttccccgtcggcatatcgtgtttgtcctctccaaaatgacacagatacctacttaggtattccagcagacgtggcggcagttcttccagtagacgtggtgactgatcctaacatcttgctgggcatgcagacaacggtacacattgcggagctagtgaaggcatgtcatccgtcacccgatgttgtgagcgctgtaggggtgcacgtgaattggctcaacgaagtcttgctccgagttgtccagaaggaatctcagttgcaagggaccgaggcctacaacgagtgccttgcgcttttaggtcgcattcaatgtgtcatgaagatggggccgtttgtctcggtagtgccgcagctgcaatacagaatgtacggtagcctcatcaaccaaatggcccaagtagcacaaaactacgaccgagaattcaagcaattcaaattattcatcatccaaaatcaaatccttggcagctatttgctgcagcagaacagggcatttgctgagagggagctgcagatggagagctttcatgctgctgtcatttctcaaagaagggaggagttggacaatacattcgcaaagatggaccgattgagcgggcaaatggaggcagagagtagtgcaatggagcaagccaaaaaggaaatggacgaaggattgaggcagttccagaataggcaagttgcgaacgccctctttgccgttcttagcgctgtagctcagattgggcttgcattccttacggctggtgcaacggctcctggagctgtggcgtcggcggggcaagctgtgagcatagcaggtcaggcggcgcaaggtctgcgaagggtggtggaaattctagagcagctggaggctgtgatggaggttgtggctgctgtgaaggacctcgtggattcattggaacaggtaggtcagattgtggacgcaccggtgatgccggaattgccctcagaggcggactggtccatttttgtgaacgaggtggaggccgtggcagagggcatgccaacggaagtctcggaggttccggtgtggagggccaagtgcaagaatgtggctgcactgggtcgggagatgagcatcacggcagtacagatgtcggagctgcagtatgacatctgggtgcaaggcatgatgcgggatatggctcgaagccaggcagacaggctggccgcaattcaacccgcggaccttaccaactatttggagatggctacccagatggatatgcggactacgaggatgctgctggggctcctcaacatattgcgcatccagaatgcggcgctcaggtacgagtatcttctaatgcccacggagctcacaacatggccactgggtatggataccgtgggtgacttgctcatcgcgcaggagaatgctgcactgataggattaatgcagctagggccctcatctgatttcacgagcaggcatgtggtgaaagacatacctgtgaacttgctgctcgatggcgaggattgggagtttgagattcctgtgcaagctggcatgtccagcttcccttccagctggtctcgcgtccgtattcggcacctggagatgcactttgtgaaggaggccagcggtattggtggtgagattatccaccagcctaccacccagactgggaccgtttacatccttctgcagggttccactatcttccatgaccgcagaagagaccaggtgttgccttttcaggccgctgctccgctcaactaccattacgcgtaccgcctcgacaccggcgactccactctcacaaacgaaccctctgaacagtttgccaacaagttcatgcagatgacacccttcacccgttggaggcttcgtctgtctgcgtccgcaaaagagaatgcaggattagcctttcccacggctacagcacttgactccactacccagattgtcatcactttccatgttacggccatcagacaaattgactggcggcacgacgaagagtagc

SEQ ID NO: 725 - DNA, 2586 bp, synthetic construct
  misc_feature 1..2586: note = encodes PtIP-83 polypeptide variant
  source 1..2586: mol_type = other DNA
atggattacagcacgctttacagggatctgaaccagataagcatgcccctggatcgggtagagttctcagaggtgatggtaatccacaggatgtacttgaggttatctgatctgaatgtggggcagctcgagggagccgagaaagtgaagcggttgtatgtgtttgcggacgtggtggagctaccagtcgtggaatggcggtggccgccgcaaataccaggatcggtgacggtgatcatattgtgtcgtcttcttcaatggccaactgatgggaggcagtcggacaccgagctccacctgacattcatgaagttgcatgccatacaacgagaggaaaatcggtgggagataaccgcagcagatggcatgaactggggagtttacatacacgcagaggaagtacaggttggcgtgctgacaatgtcatggtcttcggtacttagagtttcggcacttcgctctgttataacctccggctttcgcgccgttagtgtgtttgaggtaccgggaagtgtaaggtccacccttggagctactttaaggcccgatcacgccttatatagtacaactatgcaagccacacccaacgcatcgcatattagtgcttttaaccttcgcatagtttccccgtcggcatatcgtgtttgtcctctccaaaatgacacagatacctacttaggtattccagcagacgtggcggcagttcttccagtagacgtggtgactgatcctaacatcttgctgggcatgcagacaacggtacacattgcggagctagtcaaggcatgtcatccgtcacccgatgttgtgagcgctgtaggggagcacctgaactggctcaacaaactcttactcccacttaaggaatcgactcagttgcaaggaagcgagtcgtacaaggagtgccttgcactcttgggtcgtgttcacgctgcgatgaagatggtgagaattggcttagtagtgccccagctgcaatacagaatgtacggtagcctcatcaaccaaatggcccaagtagcacaaaactacgaccgagaattcaagcaattcaaattattcatcatccaaaatcaaatccttggcagctatttgctgcagcagaacaaggcctttgctgacagagaggtgcagatggagagctttcattcagcggtcatttctcaaagaaggcaggagttggacgacgccatcgctaagatggaccgactgagcttgcagatggaggaagaggacagagcaatggagcaagcccgaaaagaaatggaagaaggattgaagcagttccagaatgagcaagttgcaagggctgtgttcgctgttcttaaatctgtagctatgattgcgctcgcattcgtcacggctggtgcaacggctcctggggctgcagcatctgcagcgcaagctgtgaacatagccggtcaagcggcacaagctctgcgaagggtggtggaaattctagaggggctcgaggctgtgatggaggttgtggctgctataaagcaccttgtggatgctctggaccaggtaagtcagattgtggatgcaccacctatgccagacatgccctcggaggcggactggagtatttttgtgaatgagattgaagccgtggcagaggggatgccgacggaagtctcggaggttccggcgtggaaggccaagtgcaagaatgtggctgcactgggtagggagatgtgcatcacggcagaacagatttcccagctccagtatgacatctgggtgcaaggcttgttgcgggatatagctcaaagccacgcagaccggctggcagcgattcaacctgctaatcttaccaactatttggagatggcaatacagatggatatgcggactacgaggatactgatagggctcctcaacataatgcgcatccagaatgcggcacttatgtatgagtaccttctaacgcccacgcagctcactgcatggccgctgagaatggatactgtggccaacttgctcatcacgcacgagagtgctgcactgtcaggattagctcagttagggcccccatcggacttcacgagcaggcatgtagtgaaaggcatacctgtgagcttgcttctagacggtggggattgggaatttgagattcctgtgcaaggtggcatgtccagtttcccttccagctggactcgagtgcggattcggcacctggagatgcactttgtgcaggaggcgagcggtggcggcgagattatccaccagcctgccacccagacggggaccatttacatcctcctgcagggctccactgtcttccatgatcgcagaagggaggaggtgatgacctttcaggcagcggttccgctcaactaccattacgcgtaccgcctcgacactggagaagccactcttacgaacgagccctcggaacagtttgccaacacattcatgcagatgacaccgttcactcactggaggctacgtctgtctgcgtccgcagcggagaataaaggattagcctttcccacagctacagctcccgactccaccactgagattgccatcactttccatgttacggccattagacaaattgactggcggcaagaggaggag

SEQ ID NO: 726 - DNA, 2595 bp, synthetic construct
  misc_feature 1..2595: note = encodes PtIP-83 polypeptide variant
  source 1..2595: mol_type = other DNA
atggctctcgtggattacggcaagcttttcgaggatctgaaccagataagcatgcccctggatcgggtagagttctcagaggtgatggtaatccacaggatgtacttgaggttatctgatctgaatgtgggggagctccccggagccgagagggtgaagcggttgtatgtgtttgcggacgtggtggagctaccagtcgtggaatggcggtggccgccgcaaataccaggatcggtgacggtgatcatattgtgtcgtcttcttcaatggccaactgatgggaggcagtcggacaccgagctccacctgacattcatgaagttgcatgccatacaacgagaggaaaatcggtgggagataaccgcagcagatggcatgaactggggagtttacatacacgcagaggaagtacaggttggcgtgctgacaatgtcatggtcttcggtacttagagtttcggcacttcgctctgttataacctccggctttcgcgccgttagtgtgtttgaggtaccgggaagtgtaaggtccacccttggagctactttaaggcccgatcacgccttatatagtacaactatgcaagccacacccaacgcatcgcatattagtgcttttaaccttcgcatagtttccccgtcggcatatcgtgtttgtcctctccaaaatgacacagatacctacttaggtattccagcagacgtggcggcagttcttccagtagacgtggtgactgatcctaacatcttgctgggcatgcagacaacggtacacattgcggagctagtcaaggcatgtcatccgtcacccgatgttgtgagcgctgtaggggagcacctgaactggctcaacaaactcttactcccacttaaggaatcgactcagttgcaaggaagcgagtcgtacaaggagtgccttgcactcttgggtcgtgttcacgctgcgatgaagatggtgagaattggcttagtagtgccccagctgcaatacagaatgtacggtagcctcatcaaccaaatggcccaggtagcacaaaactacgaccgagaattcaagcaattcaaattattcatcatccaaaatcaaatccttggcagctatttgctgcagcagaacaaggcctttgctgacagagaggtgcagatggagagctttcattcagcggtcatttctcaaagaaggcaggagttggacgacgccatcgctaagatggaccgactgagcttgcagatggaggaagaggacagagcaatggagcaagcccgaaaagaaatggaagaaggattgaagcagttccagaatgagcaagttgcaagggctgtgttcgctgttcttaaatctgtagctatgattgcgctcgcattcgtcacggctggtgcaacggctcctggggctgcagcatctgcagcgcaagctgtgaacatagccggtcaagcggcacaagctctgcgaagggtggtggaaattctagaggggctcgaggctgtgatggaggttgtggctgctataaagcaccttgtggatgctctggaccaggtaagtcagattgtggatgcaccacctatgccagacatgccctcggaggcggactggagtatttttgtgaatgagattgaagccgtggcagaggggatgccgacggaagtctcggaggttccggcgtggaaggccaagtgcaagaatgtggctgcactgggtagggagatgtgcatcacggcagaacagatttcccagctccagtatgacatctgggtgcaaggcttgttgcgggatatagctcaaagccacgcagaccggctggcagcgattcaacctgctaatcttaccaactatttggagatggcaatacagatggatatgcggactacgaggatactgatagggctcctcaacataatgcgcatccagaatgcggcacttatgtatgagtaccttctaacgcccacgcagctcactgcatggccgctgagaatggatactgtggccaacttgctcatcacgcacgagagtgctgcactgtcaggattagctcagttagggcccccatcggacttcacgagcaggcatgtagtgaaaggcatacctgtgagcttgcttctagacggtggggattgggaatttgagattcctgtgcaaggtggcatgtccagtttcccttccagctggactcgagtgcggattcggcacctggagatgcactttgtgcaggaggcgagcggtggcggcgagattatccaccagcctgccacccagacggggaccatttacatcctcctgcagggctccactgtcttccatgatcgcagaagggaggaggtgatgacctttcaggcagcggttccgctcaactaccattacgcgtaccgcctcgacactggagaagccactcttacgaacgagccctcggaacagtttgccaacacattcatgcagatgacaccgttcactcactggaggctacgtctgtctgcgtccgcagcggagaataaaggattagcctttcccacagctacagctcccgactccaccactgagattgccatcactttccatgttacggccattagacaaattgactggcggcaagaggaggag

SEQ ID NO: 727 - DNA, 2601 bp, synthetic construct
  misc_feature 1..2601: note = encodes PtIP-83 polypeptide variant
  source 1..2601: mol_type = other DNA
atggctctcgtggattacggcaagcttttcgaggatctgaaccagataagcatgggtgtactggatcgggtagagttttcagaggtgatggtgatccacaggatgtatgtgaggctagctgatctgaatgtggggcagctccccggagccgagagggtgaagcggttgtatgtgtttgcggacgtggtggagctaccagtcgtggaatggcggtggccgccgcaaataccaggatcggtgacggtgatcattctgtgtcgtcttcttcaatggccaactgatgggaggcagtcggacaccgagctccacctgacattcatgaagttgcatgccatacaacgggaggaaaatcagtgggagataaccgcagcagatggcatgaactggggagtttacatacacgcagaggaagtacaggttggcgtgctgacaatgtcatggtcttcggtacttagagtttcggcacttcgctctgttataacctccggctttcgcgccgttagtgtgtttgaggtaccgggaagtgtaaggtccacccttggagctactttaaggcccgatcacgccttatatagtacaactatgcaagccacacccaacgcatcgcatattagtgcttttaaccttcgcatagtttccccgtcggcatatcgtgtttgtcctctccaaaatgacacagatacctacttaggtattccagcagacgtggcggcagttcttccagtagacgtggtgactgatcctaacatcttgctgggcatgcagacaacggtacacattgcggagctagtcaaggcatgtcatccgtcacccgatgttgtgagcgctgtaggggagcacctgaactggctcaacgaagtcttgctccgagttgtccagaaggaatctcagttgcaagggaccgaggcctacaacgagtgccttgcgcttttaggtcgcattcaatgtgtcatgaagatggggccgtttgtctcggtagtgccgcagctgcaatacagaatgtacggtagcctcatcaaccaaatggcccaagtagcacaaaactacgaccaagatttcaggcaattcaaattattcatcatccaaaatcaaatccttggcagctatttgctgcagcagaacaaggcctttgctgacagagaggtgcagatggagagctttcattcagcggtcatttctcaaagaaggcaggagttggacgacgccatcgctaagatggaccgactgagcttgcagatggaggaagaggacagagcaatggagcaagcccgaaaagaaatggaagaaggattgaagcagttccagaatgagcaagttgcaagggctgtgttcgctgttcttaaatctgtagctatgattgcgctcgcattcgtcacggctggtgcaacggctcctggggctgcagcatctgcagcgcaagctgtgaacatagccggtcaagcggcacaagctctgcgaagggtggtggaaattctagaggggctcgaggctgtgatggaggttgtggctgctataaagcaccttgtggatgctctggaccaggtaagtcagattgtggatgcaccacctatgccagacatgccctcggaggcggactggagtatttttgtgaatgagattgaagccgtggcagaggggatgccgacggaagtctcggaggttccggcgtggaaggccaagtgcaagaatgtggctgcactgggtagggagatgtgcatcacggcagaacagatttcccagctccagtatgacatctgggtgcaaggcttgttgcgggatatagctcaaagccacgcagaccggctggcagcgattcagcctgctaatcttaccaactatttggagatggcaatacagatggatatgcggactacgaggatactgatagggctcctcaacataatgcgcatccagaatgcggcacttatgtatgagtaccttctaacgcccacgcagctcactgcatggccgctgagaatggatactgtggccaacttgctcatcacgcacgagagtgctgcactgtcaggattagctcagttagggcccccatcggacttcacgagcaggcatgtagtgaaaggcatacctgtgagcttgcttctagacggtggggattgggaatttgagattcctgtgcaaggtggcatgtccagtttcccttccagctggactcgagtgcggattcggcacctggagatgcactttgtgcaggaggcgagcggtggcggcgagattatccaccagcctgccacccagacggggaccatttacatcctcctgcagggctccactgtcttccatgatcgcagaagggaggaggtgatgacctttcaggcagcggttccgctcaactaccattacgcgtaccgcctcgacactggagaagccactcttacgaacgagccctcggaacagtttgccaacacattcatgcagatgacaccgttcactcactggaggctacgtctgtctgcgtccgcagcggagaataaaggattagcctttcccacagctacagctcccgactccaccactgagattgccatcactttccatgttacggccattagacaaattgactggcggcaagaggaggag

SEQ ID NO: 728 - protein, 866 aa, synthetic construct
  REGION 1..866: note = PtIP-83 polypeptide variant
MALVDYGKLFEDLNQISMGVLDRVEFSEVMVIHRMYVRLADLNVGQLEGAEKVKRLYVFADVVELPVVEWRWPPQIPGSVTVIILCRLLQWPTDGRQSDTELHLTFMKLHAIQREENRWEITAADGMNWGVYIHAEEVQVGVLTMSWSSVLRVSALRSVITSGFRAVSVFEVPGSVRSTLGATLRPDHALYSTTMQATPNASHISAFNLRIVSPSAYRVCPLQNDTDTYLGIPADVAAVLPVDVVTDPNILLGMQTTVHIAELVKACHPSPDVVSAVGEHLNWLNKLLLPLKESTQLQGTEAYNECLALLGRIQCVMKMGPFVSVVPQLQYRMYGSLIRQMAQVAQNYDQDFRQLKLFIAQNQILGSYLLQQNKAFADREVQMESFHSAVISQRRQELDDAIAKMDRLSLQMEEEDRAMEQARKEMEEGLKQFQNEQVARAVFAVLKSVAMIALAFVTAGATAPGAAASAAQAVNIAGQAAQALRRVVEILEGLEAVMEVVAAIKHLVDALDQVSQIVDAPPMPDMPSEADWSIFVNEIEAVAEGMPTEVSEVPAWKAKCKNVAALGREMCITAEQISQLQYDIWVQGLLRDIAQSHADRLAAIQPANLTNYLEMAIQMDMRTTRILIGLLNIMRIQNAALMYEYLLTPTQLTAWPLRMDTVANLLITHESAALSGLAQLGPPSDFTSRHVVKGIPVSLLLDGGDWEFEIPVQGGMSSFPSSWTRVRIRHLEMHFVQEASGGGEIIHQPATQTGTIYILLQGSTVFHDRRREEVMTFQAAVPLNYHYAYRLDTGEATLTNEPSEQFANTFMQMTPFTHWRLRLSASAAENKGLAFPTATAPDSTTEIAITFHVTAIRQIDWRQEEE

SEQ ID NO: 729 - protein, 866 aa, synthetic construct
  REGION 1..866: note = PtIP-83 polypeptide variant
MALVDYGKLFEDLNQISMGVLDRVEFSEVMVIHRMYVRLADLNVGQLEGAEKVKRLYVFADVVELPVVEWRWPPQIPGSVTVIILCRLLQWPTDGRQSDTELHLTFMKLHAIQREENRWEITAADGMNWGVYIHAEEVQVGVLTMSWSSVLRVSALRSVITSGFRAVSVFEVPGSVRSTLGATLRPDHALYSTTMQATPNASHISAFNLRIVSPSAYRVCPLQNDTDTYLGIPADVAAVLPVDVVTDPNILLGMQTTVHIAELVKACHPSPDVVSAVGEHLNWLNKLLLPLKESTQLQGSESYKECLALLGRVHAAMKMGPFVSVVPQLQYRMYGSLIRQMAQVAQNYDQDFRQLKLFIAQNQILGSYLLQQNKAFADREVQMESFHSAVISQRRQELDDAIAKMDRLSLQMEEEDRAMEQARKEMEEGLKQFQNEQVARAVFAVLKSVAMIALAFVTAGATAPGAAASAAQAVNIAGQAAQALRRVVEILEGLEAVMEVVAAIKHLVDALDQVSQIVDAPPMPDMPSEADWSIFVNEIEAVAEGMPTEVSEVPAWKAKCKNVAALGREMCITAEQISQLQYDIWVQGLLRDIAQSHADRLAAIQPANLTNYLEMAIQMDMRTTRILIGLLNIMRIQNAALMYEYLLTPTQLTAWPLRMDTVANLLITHESAALSGLAQLGPPSDFTSRHVVKGIPVSLLLDGGDWEFEIPVQGGMSSFPSSWTRVRIRHLEMHFVQEASGGGEIIHQPATQTGTIYILLQGSTVFHDRRREEVMTFQAAVPLNYHYAYRLDTGEATLTNEPSEQFANTFMQMTPFTHWRLRLSASAAENKGLAFPTATAPDSTTEIAITFHVTAIRQIDWRQEEE

SEQ ID NO: 730 - protein, 853 aa, synthetic construct
  REGION 1..853: note = PtIP-83 polypeptide variant
MDYSTLYRDLNQISMPLDRVEFSEVMVIHRMYLRLSDLNVGELPGAERVKRLYVLADVVELATFAHPQLLNTRMPGSVTVIILCRLLQFPTDGSFAAWLELPFMELHTLIEQYRSEIKAADDAKWGTYVHAEEVQLSPLFNGWPYLVVEAQRCIITAAMHNTFNRPGWVRSITQFTTDQSGRVDTTLLARTEFGHIDLPLETDSPTAFSVSHRQSTNLPVEYTGIPVEVVTDPNILMGMQTSVHIAELVKACYPSPELVSAVGVHVNWLNEVLLRVVQKESQLQGSESYKECLALLGRVHAAMKMVRIGLVVPQLQYRMYGSLINQMAQVAQNYDREFKQFKLFIIQNQILGSYLLQQNRAFAERELQMESFHAAVISQRREELDNTFAKMDRLSGQMEAESSAMEQAKKEMDEGLRQFQNRQVANALFAVLSAVAQIGLAFLTAGATAPGAVASAGQAVSIAGQAAQGLRRVVEILEQLEAVMEVVAAVKDLVDSLEQVGQIVDAPVMPELPSEADWSIFVNEVEAVAEGMPTEVSEVPVWRAKCKNVAALGREMSITAVQMSELQYDIWVQGMMRDMARSQADRLAAIQPADLTNYLEMATQMDMRTTRMLLGLLNILRIQNAALRYEYLLMPTELTTWPLGMDTVGDLLIAQENAALIGLMQLGPSSDFTSRHVVKDIPVNLLLDGEDWEFEIPVQAGMSSFPSSWSRVRIRHLEMHFVKEASGIGGEIIHQPTTQTGTVYILLQGSTIFHDRRRDQVLPFQAAAPLNYHYAYRLDTGDSTLTNEPSEQFANKFMQMTPFTRWRLRLSASAKENAGLAFPTATALDSTTQIVITFHVTAIRQIDWRHDEE

SEQ ID NO: 731 - protein, 867 aa, synthetic construct
  REGION 1..867: note = PtIP-83 polypeptide variant
MALVDYGKLFEDLNQISMGVLDRVEFSEVMVIHRMYVRLADLNVGQLEGAEKVKRLYVFADVVELPVVEWRWPPQIPGSVTVIILCRLLQWPTDGRQSDTELHLTFMKLHAIQREENRWEITAADGMNWGVYIHAEEVQVGVLTMSWSSVLRVSALRSVITSGFRAVSVFEVPGSVRSTLGATLRPDHALYSTTMQATPNASHISAFNLRIVSPSAYRVCPLQNDTDTYLGIPADVAAVLPVDVVTDPNILLGMQTTVHIAELVKACHPSPDVVSAVGEHVNWLNEVLLRVVQKESQLQGTEAYNECLALLGRIQCVMKMGPFVSVVPQLQYRMYGSLIRQMAQVAQNYDQDFRQLKLFIAQNQILGSYLLQQNKAFADREVQMESFHSAVISQRRQELDDAIAKMDRLSLQMEEEDRAMEQARKEMEEGLKQFQNEQVARAVFAVLKSVAMIALAFVTAGATAPGAAASAAQAVNIAGQAAQALRRVVEILEGLEAVMEVVAAIKHLVDALDQVSQIVDAPPMPDMPSEADWSIFVNEIEAVAEGMPTEVSEVPAWKAKCKNVAALGREMCITAEQISQLQYDIWVQGLLRDIAQSHADRLAAIQPANLTNYLEMAIQMDMRTTRILIGLLNIMRIQNAALMYEYLLTPTQLTAWPLRMDTVANLLITHESAALSGLAQLGPPSDFTSRHVVKGIPVSLLLDGGDWEFEIPVQGGMSSFPSSWTRVRIRHLEMHFVQEASGGGEIIHQPATQTGTIYILLQGSTVFHDRRREEVMTFQAAVPLNYHYAYRLDTGEATLTNEPSEQFANTFMQMTPFTHWRLRLSASAAENKGLAFPTATAPDSTTEIAITFHVTAIRQIDWRQEEE

SEQ ID NO: 732 - protein, 850 aa, synthetic construct
  REGION 1..850: note = PtIP-83 polypeptide variant
MDYSTLYRDLNQISMPLDRVEFSEVMVIHRMYLRLSDLNVGQLEGAERVKRLYVFADVVELPVVEWRWPPQIPGSVTVIILCRLLQFPTDGSFAAWLGLPFMELHTLIEQYRSEIKAADDAKWGTYVHAEEVQLSPLFNGWPYLVVEAQRCIITAAMHNTFNRPGWVRSITQFTTDQSGRVDTTLLARTEFGHIDLPLETDSPTAFSVSHRQSTNLPVEYTGIPVEVVTDPNILMGMQTSVHIAELVKACYPSPELVSAVGVHVNWLNEVLLRVVQKESQLQGTEAYNECLALLGRIQCVMKMGPFVSVVPQLQYRMYGSLIRQMAQVAQNYDQDFRQLKLFIAQNQILGSYLLQQNKAFADREVQMESFHSAVISQRRQELDDAIAKMDRLSLQMEEEDRAMEQARKEMEEGLKQFQNEQVARAVFAVLKSVAMIALAFVTAGATAPGAAASAAQAVNIAGQAAQALRRVVEILEGLEAVMEVVAAIKHLVDALDQVSQIVDAPPMPDMPSEADWSIFVNEIEAVAEGMPTEVSEVPAWKAKCKNVAALGREMCITAEQISQLQYDIWVQGLLRDIAQSHADRLAAIQPANLTNYLEMAIQMDMRTTRILIGLLNIMRIQNAALMYEYLLTPTQLTAWPLRMDTVANLLITHESAALSGLAQLGPPSDFTSRHVVKGIPVSLLLDGGDWEFEIPVQGGMSSFPSSWTRVRIRHLEMHFVQEASGGGEIIHQPATQTGTIYILLQGSTVFHDRRREEVMTFQAAVPLNYHYAYRLDTGEATLTNEPSEQFANTFMQMTPFTHWRLRLSASAAENKGLAFPTATAPDSTTEIAITFHVTAIRQIDWRQEEE

SEQ ID NO: 733 - protein, 863 aa, synthetic construct
  REGION 1..863: note = PtIP-83 polypeptide variant
MDYSTLYRDLNQISMPLDRVEFSEVMVIHRMYLRLSDLNVGELPGAERVKRLYVFADVVELPVVEWRWPPQIPGSVTVIILCRLLQWPTDGRQSDTELHLTFMKLHAIQREENRWEITAADGMNWGVYIHAEEVQVGVLTMSWSSVLRVSALRSVITSGFRAVSVFEVPGSVRSTLGATLRPDHALYSTTMQATPNASHISAFNLRIVSPSAYRVCPLQNDTDTYLGIPADVAAVLPVDVVTDPNILMGMQTSVHIAELVKACHPSPDVVSAVGVHVNWLNEVLLRVVQKESQLQGTEAYNECLALLGRIQCVMKMGPFVSVVPQLQYRMYGSLIRQMAQVAQNYDQDFRQLKLFIAQNQILGSYLLQQNKAFADREVQMESFHSAVISQRRQELDDAIAKMDRLSLQMEEEDRAMEQARKEMEEGLKQFQNEQVARAVFAVLKSVAMIALAFVTAGATAPGAAASAAQAVNIAGQAAQALRRVVEILEGLEAVMEVVAAIKHLVDALDQVSQIVDAPPMPDMPSEADWSIFVNEIEAVAEGMPTEVSEVPAWKAKCKNVAALGREMCITAEQISQLQYDIWVQGLLRDIAQSHADRLAAIQPANLTNYLEMAIQMDMRTTRILIGLLNIMRIQNAALMYEYLLTPTQLTAWPLRMDTVANLLITHESAALSGLAQLGPPSDFTSRHVVKGIPVSLLLDGGDWEFEIPVQGGMSSFPSSWTRVRIRHLEMHFVQEASGGGEIIHQPATQTGTIYILLQGSTVFHDRRREEVMTFQAAVPLNYHYAYRLDTGEATLTNEPSEQFANTFMQMTPFTHWRLRLSASAAENKGLAFPTATAPDSTTEIAITFHVTAIRQIDWRQEEE

SEQ ID NO: 734 - protein, 868 aa, synthetic construct
  REGION 1..868: note = PtIP-83 polypeptide variant
MALVDYGKLFEDLNQISMGVLDRVEFSEVMVIHRMYVRLADLNVGQLEGAEKVKRLYVFADVVELPVVEWRWPPQIPGSVTVIILCRLLQWPTDGRQSDTELHLTFMKLHAIQREENRWEITAADGMNWGVYIHAEEVQVGVLTMSWSSVLRVSALRSVITSGFRAVSVFEVPGSVRSTLGATLRPDHALYSTTMQATPNASHISAFNLRIVSPSAYRVCPLQNDTDTYLGIPADVAAVLPVDVVTDPNILLGMQTTVHIAELVKACHPSPDVVSAVGVHVNWLNEVLLRVVQKESQLQGTEAYNECLALLGRIQCVMKMGPFVSVVPQLQYRMYGSLINQMAQVAQNYDREFKQFKLFIIQNQILGSYLLQQNRAFAERELQMESFHAAVISQRREELDNTFAKMDRLSGQMEAESSAMEQAKKEMDEGLRQFQNRQVANALFAVLSAVAQIGLAFLTAGATAPGAVASAGQAVSIAGQAAQGLRRVVEILEQLEAVMEVVAAVKDLVDSLEQVGQIVDAPVMPELPSEADWSIFVNEVEAVAEGMPTEVSEVPVWRAKCKNVAALGREMSITAVQMSELQYDIWVQGMMRDMARSQADRLAAIQPADLTNYLEMATQMDMRTTRMLLGLLNILRIQNAALRYEYLLMPTELTTWPLGMDTVGDLLIAQENAALIGLMQLGPSSDFTSRHVVKDIPVNLLLDGEDWEFEIPVQAGMSSFPSSWSRVRIRHLEMHFVKEASGIGGEIIHQPTTQTGTVYILLQGSTIFHDRRRDQVLPFQAAAPLNYHYAYRLDTGDSTLTNEPSEQFANKFMQMTPFTRWRLRLSASAKENAGLAFPTATALDSTTQIVITFHVTAIRQIDWRHDEE

SEQ ID NO: 735 - protein, 862 aa, synthetic construct
  REGION 1..862: note = PtIP-83 polypeptide variant
MDYSTLYRDLNQISMPLDRVEFSEVMVIHRMYLRLSDLNVGQLEGAEKVKRLYVFADVVELPVVEWRWPPQIPGSVTVIILCRLLQWPTDGRQSDTELHLTFMKLHAIQREENRWEITAADGMNWGVYIHAEEVQVGVLTMSWSSVLRVSALRSVITSGFRAVSVFEVPGSVRSTLGATLRPDHALYSTTMQATPNASHISAFNLRIVSPSAYRVCPLQNDTDTYLGIPADVAAVLPVDVVTDPNILLGMQTTVHIAELVKACHPSPDVVSAVGEHLNWLNKLLLPLKESTQLQGSESYKECLALLGRVHAAMKMVRIGLVVPQLQYRMYGSLINQMAQVAQNYDREFKQFKLFIIQNQILGSYLLQQNKAFADREVQMESFHSAVISQRRQELDDAIAKMDRLSLQMEEEDRAMEQARKEMEEGLKQFQNEQVARAVFAVLKSVAMIALAFVTAGATAPGAAASAAQAVNIAGQAAQALRRVVEILEGLEAVMEVVAAIKHLVDALDQVSQIVDAPPMPDMPSEADWSIFVNEIEAVAEGMPTEVSEVPAWKAKCKNVAALGREMCITAEQISQLQYDIWVQGLLRDIAQSHADRLAAIQPANLTNYLEMAIQMDMRTTRILIGLLNIMRIQNAALMYEYLLTPTQLTAWPLRMDTVANLLITHESAALSGLAQLGPPSDFTSRHVVKGIPVSLLLDGGDWEFEIPVQGGMSSFPSSWTRVRIRHLEMHFVQEASGGGEIIHQPATQTGTIYILLQGSTVFHDRRREEVMTFQAAVPLNYHYAYRLDTGEATLTNEPSEQFANTFMQMTPFTHWRLRLSASAAENKGLAFPTATAPDSTTEIAITFHVTAIRQIDWRQEEE

SEQ ID NO: 736 - protein, 865 aa, synthetic construct
  REGION 1..865: note = PtIP-83 polypeptide variant
MALVDYGKLFEDLNQISMPLDRVEFSEVMVIHRMYLRLSDLNVGELPGAERVKRLYVFADVVELPVVEWRWPPQIPGSVTVIILCRLLQWPTDGRQSDTELHLTFMKLHAIQREENRWEITAADGMNWGVYIHAEEVQVGVLTMSWSSVLRVSALRSVITSGFRAVSVFEVPGSVRSTLGATLRPDHALYSTTMQATPNASHISAFNLRIVSPSAYRVCPLQNDTDTYLGIPADVAAVLPVDVVTDPNILLGMQTTVHIAELVKACHPSPDVVSAVGEHLNWLNKLLLPLKESTQLQGSESYKECLALLGRVHAAMKMVRIGLVVPQLQYRMYGSLINQMAQVAQNYDREFKQFKLFIIQNQILGSYLLQQNKAFADREVQMESFHSAVISQRRQELDDAIAKMDRLSLQMEEEDRAMEQARKEMEEGLKQFQNEQVARAVFAVLKSVAMIALAFVTAGATAPGAAASAAQAVNIAGQAAQALRRVVEILEGLEAVMEVVAAIKHLVDALDQVSQIVDAPPMPDMPSEADWSIFVNEIEAVAEGMPTEVSEVPAWKAKCKNVAALGREMCITAEQISQLQYDIWVQGLLRDIAQSHADRLAAIQPANLTNYLEMAIQMDMRTTRILIGLLNIMRIQNAALMYEYLLTPTQLTAWPLRMDTVANLLITHESAALSGLAQLGPPSDFTSRHVVKGIPVSLLLDGGDWEFEIPVQGGMSSFPSSWTRVRIRHLEMHFVQEASGGGEIIHQPATQTGTIYILLQGSTVFHDRRREEVMTFQAAVPLNYHYAYRLDTGEATLTNEPSEQFANTFMQMTPFTHWRLRLSASAAENKGLAFPTATAPDSTTEIAITFHVTAIRQIDWRQEEE

SEQ ID NO: 737 - protein, 867 aa, synthetic construct
  REGION 1..867: note = PtIP-83 polypeptide variant
MALVDYGKLFEDLNQISMGVLDRVEFSEVMVIHRMYVRLADLNVGQLPGAERVKRLYVFADVVELPVVEWRWPPQIPGSVTVIILCRLLQWPTDGRQSDTELHLTFMKLHAIQREENQWEITAADGMNWGVYIHAEEVQVGVLTMSWSSVLRVSALRSVITSGFRAVSVFEVPGSVRSTLGATLRPDHALYSTTMQATPNASHISAFNLRIVSPSAYRVCPLQNDTDTYLGIPADVAAVLPVDVVTDPNILLGMQTTVHIAELVKACHPSPDVVSAVGEHLNWLNEVLLRVVQKESQLQGTEAYNECLALLGRIQCVMKMGPFVSVVPQLQYRMYGSLINQMAQVAQNYDQDFRQFKLFIIQNQILGSYLLQQNKAFADREVQMESFHSAVISQRRQELDDAIAKMDRLSLQMEEEDRAMEQARKEMEEGLKQFQNEQVARAVFAVLKSVAMIALAFVTAGATAPGAAASAAQAVNIAGQAAQALRRVVEILEGLEAVMEVVAAIKHLVDALDQVSQIVDAPPMPDMPSEADWSIFVNEIEAVAEGMPTEVSEVPAWKAKCKNVAALGREMCITAEQISQLQYDIWVQGLLRDIAQSHADRLAAIQPANLTNYLEMAIQMDMRTTRILIGLLNIMRIQNAALMYEYLLTPTQLTAWPLRMDTVANLLITHESAALSGLAQLGPPSDFTSRHVVKGIPVSLLLDGGDWEFEIPVQGGMSSFPSSWTRVRIRHLEMHFVQEASGGGEIIHQPATQTGTIYILLQGSTVFHDRRREEVMTFQAAVPLNYHYAYRLDTGEATLTNEPSEQFANTFMQMTPFTHWRLRLSASAAENKGLAFPTATAPDSTTEIAITFHVTAIRQIDWRQEEE

SEQ ID NO: 738 - DNA, 2538 bp, Polystichum luctuosum
  source 1..2538: mol_type = unassigned DNA; note = Polystichium tsus-simense
atggattacagcacgctttacagggatctgaaccaggtaagggtgcctgtggatagggcagagttctcagaggtgatggtgatccataggatgtatgtgaggttatctgatctggatgtgggggagctcgttggagccgagagagtgaagcggttgtacgtgtttgcggacgtggtggagcttgttccgcagactgtgtggtttagacaaattcaaatgccaggatcggtgacggtgatcatattgtgtcgtcttcttcaatttccaactgttgggtcgcaagctgaaactctccagctgcccttcatgaggttgcaggccatagtcaaagagcaaaataggtcggagataacagcagcagatgggatgaagtggggaacgtacatacacgggaacgaagtgcagcttcgttctaacaattccagatttgacgtctgggcacctcgctcgattataacctcagccattcacaatgtgctcaacgaacctgggagattagcttccaatactgtaattgcaagggctcagggagcagtgactactacgcgaatgtcagcctggctcagtcatcaaggtttcgtactccccacagtttccccaacggcatttagcgttttacctctccaaagtacgaatgtatccttcacaagtattcctgtggaggttgtcactgatcctaacatcttgctgggcatgcagaccaccctgcacattgcagagctagtcaaggtatgtcacccatcacccgacattgtgagcgctgtagcggagcacgcgatttggctcagcaaagtcttgcttcaagttgtccagaacgaatctcagttgcaagggaccgagtcctacaacgagtgccttgcgctcttgggtcgtgttcaatctgtgataaagatggggagatttggctcagtagtgccccagctgcaataccgaatgtacggcagcctcatcaatcaaatggctcaagtagcacaaaattacgaccgagaattcaagcaattcaagttgttcattatccaaaaccaaatccttggcagctacttgctgcagcagaacaaggcatttgctgacagggagctgcagatggagagctttcattctgcagtcatttctcatagagcccaggagttggacactgccatcgcaaagatggaccgattgagcttgcaaatggaggaagagaatagagcaatggagcaagccgaaaaggaaatgaacgaaggattgaggaggttccagaacgagcaagttgcaagggccatattttcagttcttagagctgtagctatgattgggcttgcatttgtcacgggtggtgcaacggctcctgcagctgtggcatccgcggggcaagctgtgagcatagccggtcaggccgcacaagctctgcgaagggtggtggaaattctagagggcctggcggctgtgatggaggtcgtggctgctgtgaaggaacttgtggcttcattggaacaggtaggtcagattgtggacgcaccggagatgccggacatgccctcggaggcggactggtccatttttgtgaatgagattgaggctgtggcagaggggatgccgacggaagtctcggaggttccgacgtggaaggccaagtgcaagaatgtggctgcactgggtagggagatgagcatcacggcagtacagatttctgagctccagtatcacatctgggtgcaaggcttgatgcgggatatagctcgaagtcaggcagacaggctggcggcgattcaacccgtggaccttacaaactatttggagatggcaacacagatggatatgcggactacgaggatgctgatagggctcctcaacatgctgcgcatccagaatgcggcactcatgtacgagtaccttctaacgcccatggagctcacagcatggccgctggaaatggataccatggccaacttactcatcgagcaggagaattctgcactgttaggattaattcagctagggccctcatcggatttcacaagcaggcatgtggtgaaaggcatacctgtgagcttgctgctcgatggtgaggattgggagtttgagatccctgtgcaacgtggcatgtccagcttcccttttagctggactcgagtccggattcggcacctggagatgcactttgtgcaggaggcgagcagcggcggcgagattatccatcagcctgccacccagacagggaccgtttacatcctcctgcagggctccactatcttccatgaccgcagaagagacgaggtgatgacctttcaggcagcggacccgctcaactaccaatacgcgtaccgtctcgacactggcgaagccacccttaccaacgagccctcagaacagtttgccaacacgttcatgcagatgacacccttcactcggtggaggcttcgtctctctgcgtccgccaaagagaatgcagggttagcctttcccacagctacagctcccgactccactaccgagattgtcatcacgttccacgttacggccattagacaaattgactggaggcaggaggtggaggag

SEQ ID NO: 739 - DNA, 2538 bp, Polystichum luctuosum
  source 1..2538: mol_type = unassigned DNA; note = Polystichium tsus-simense
atggattacagcacgctttacagggatctgaaccaggtaagggtgcctgtggatagggcagagttctcagaggtgatggtgatccataggatgtatgtgaggttatctgatctggatgtgggggagctcgttggagccgagagagtgaagcggttgtacgtgtttgcggacgtggtggagcttgttccgcagactgtgtggtttagacaaattcaaatgccaggatcggtgacggtgatcatattgtgtcgtcttcttcaatttccaactgttgggtcgcaagctgaaactctccagctgcccttcatgaggttgcaggccatagtcaaagagcaaaataggtcggagataacagcagcagatgggatgaagtggggaacgtacatacacgggaacgaagtgcagcttcgttctaacaattccagatttgacgtctgggcacctcgctcgattataacctcagccgttcacaatgtgctcaacgaaccggggagattagcttccaatactgtaattgcaagggctcagggagcagtgactactacgcgaatgtcagcctggctcagtcatcaaggtttcgtactccccacagtttccccaacggcatttagcgttttacctctccaaagtacgaatgtatccttcacaagtattcctgtggaggttgtcactgatcctaacatcttgctgggcatgcagaccaccctgcacattgcagagctagtcaaggtatgtcacccatcacccgacattgtgagcgctgtagcggagcacgcgatttggctcagcaaagtcttgcttcaagttgtccagaacgaatctcagttgcaagggaccgagtcctacaacgagtgccttgcgctcttgggtcgtgttcaatctgtgataaagatggggagatttggctcagtagtgccccagctgcaataccgaatgtacggcagcctcatcaatcaaatggctcaagtagcacaaaattacgaccgagaattcaagcaattcaagttgttcattatccaaaaccaaatccttggcagctacttgctgcagcagaacaaggcatttgctgacagggagctgcagatggagagctttcattctgcagtcatttctcatagagcccaggagttggacactgccatcgcaaagatggaccgattgagcttgcaaatggaggaagagaatagagcaatggagcaagccgaaaaggaaatgaacgaaggattgaggaggttccagaacgagcaagttgcaagggccatattttcagttcttagagctgtagctatgattgggcttgcatttgtcacgggtggtgcaacggctcctgcagctgtggcatccgcggggcaagctgtgagcatagccggtcaggccgcacaagctctgcgaagggtggtggaaattctagagggcctggcggctgtgatggaggtcgtggctgctgtgaaggaacttgtggcttcattggaacaggtaggtcagattgtggacgcaccggagatgccggacatgccctcggaggcggactggtccatttttgtgaatgagattgaggctgtggcagaggggatgccgacggaagtctcggaggttccgacgtggaaggccaagtgcaagaatgtggctgcactgggtagggagatgagcatcacggcagtacagatttctgagctccagtatcacatctgggtgcaaggcttgatgcgggatatagctcgaagtcaggcagacaggctggcggcgattcaacccgtggaccttacaaactatttggagatggcaacacagatggatatgcggactacgaggatgctgatagggctcctcaacatgctgcgcatccagaatgcggcactcatgtacgagtaccttctaacgcccatggagctcacagcatggccgctggaaatggataccatggccaacttactcatcgagcaggagaattctgcactgttaggattaattcagctagggccctcatcggatttcacaagcaggcatgtggtgaaaggcatacctgtgagcttgctgctcgatggtgaggattgggagtttgagatccctgtgcaacgtggcatgtccagcttcccttttagctggactcgagtccggattcggcacctggagatgcactttgtgcaggaggcgagcagcggcggcgagattatccatcagcctgccacccagacagggaccgtttacatcctcctgcagggctccactatcttccatgaccgcagaagagacgaggtgatgacctttcaggcagcggacccgctcaactaccaatacgcgtaccgtctcgacactggcgaagccacccttaccaacgagccctcagaacagtttgccaacacgttcatgcagatgacacccttcactcggtggaggcttcgtctctctgcgtccgccaaagagaatgcagggttagcctttcccacagctacagctcccgactccactaccgagattgtcatcacgttccacgttacggccattagacaaattgactggaggcaggaggtggaggag

SEQ ID NO: 740 - DNA, 2673 bp, Polystichum luctuosum
  source 1..2673: mol_type = unassigned DNA; note = Polystichium tsus-simense
atgacgatggcggcaattactgcacctcggaagtacagcgagctgtacaaagatttgaaccagataagcgagaggattaggctggatcagatggagttctcggaggtgatggtgatccataggatgtttataaagctggaggagttggacttagggtatctcgaaggagcggagagggtgaagcgcttgtacgtttttgcagatgtggtggaggtggaagaaggtggcaactttattgaggtgggcccattagcgagactgcctgggtcgatcgtggtagtcatactatgccgcgtcctgaaagtgggagtcgtcatgaacaattatctcaataatgccatgcgcgtgcagctcccgcacatgaagttgcgtttggtggaggtcacaacccagcccacaggtactaagctgcacatacatcgtgcagatgcagaagattatcaatatcctgccctctgcatacacgccagtgtcatacaatcttccatccgtctcgcaagcaccaatcgtcctcccacctaccctatccctcttcgattctttacctttatgcccgacagaggatccggagatgttgttttctcctccgaatctcggtccctgattgatgagcctgtcaatatcttctatgtatactcccatatgcctgaatttcgtcgttcactccccgtcccggaggccgccacacttgacccggcctcgctatccgatgattggtattatgttcatcttagccgtgtgaactctgtgatgtcgagctatgttgcggctgaaggagagctggaaccggcattctcactattgaaacccaaaatcccgttcgccgtactaacagatcctaacattttgctcgccatgcagaccagcctccttatcgcggagctagtggagcttgctcacccttcagcagacacagctgatgctgtagccaagcacgtggaatggctcagcaaaatcttgcttcaggctgtgtcgacggatgaggaagggatgttaaatccatctcatgatgagcacctcgcgctcttattccgtgcacaatacctgatgaagatgatgccagggaggacgcgcagcctcgtagtaccacaactgcagtatgacgtttatagcaacctcatcaatcgaatggctcaagtggccgaaagctacgaccaatcactaaggcagtttaaactcttcattgagcaaaacaagattcttggcagctacttgctacaacaaaataaggccttcgctgacagggaaagggatatggatgtttttcattccgagcttatctctcaacggaagattgaactggataacaccttactcaagatggatcaattaagcttacaaatggagactcaaagagaagacatggaccaagccaaaaatgacatggatgccggattgcgggaattccaaaatcgacaagttgcagcagctatgtttgccgtgatcggtgctatcgctgcgattggtcttgcctttgtaactggtggtgccactgctcctgccgccatggtagcagcaaagaccgccgtgacagcagcaggtgcggctgcacgggcgctggagcgagtgatagagatcttggattccttacaagcagtgatggagatggtctctctcataaaggagctggtgagttcgctggaagagataggtcaacttgtggaggcaccagagatgccagagatgccgacagaggcggactggttcatttttgagaacgagatagagggggtggcagagcagatgccaacagaggtgtcggaggtatcggcgtggaagacgaagtgcaagaatgtggcagtgttggggcgggagatgatcactacggcgtcttacatttcggagctgcaatacgacatcaaggtgcagggcatgctgcaggagattgccagaagccatgcgaatcggctgtcgagcatccaggcaacagatctgagcaactatacagagatggtgacacagatggacatgcggaccacacgaatgttggtggcgctcatcaaggtggtgcacatgcagaatgcagcactgatgtaccagtgcctatcaccgcccacatatgtgaatgcatggccagtgacaatggagacagtgtggaccatgctggtgcagcacgagcatgcagcggttctgggattgatgaggctagggccctccttcgatttcatgcgcacgtatgtggtggaggggattcctgtgcagctgctgcttgatggggaggattgggagttcgacattccagtggaagattacacaacgttcccgtccacatggtctcgcgtgcgtattcatcacttggaaatgaagtttgtgcaagccgcagatgtgcatcagcctatcactgatactggcacagtttacatgcttctgcagggctctcgcatcttccgcgaccgcaaccgagccgatgccattcattatgaggctgccatgtcgcttgactaccactatgcctaccgccttgacacaggagagaccaccctctccaatctgccctcccaagattttaccagaactttcatgcgcatgacgcccttcactaactggaggctccgtctgtctgcctctgctgaagaaaacaaagggctccgttttcccacggctacatctgccggctccactacccagattgccgtcattttctatatctcagctatcaggaaaatttctttc

SEQ ID NO: 741 - DNA, 2679 bp, Polystichum luctuosum
  source 1..2679: mol_type = unassigned DNA; note = Polystichium tsus-simense
atgacgatggcggcaactgcgcctcgggagtacagcgaactgtacaaggatttgaaccagataagcgagaggattaggctggatcagatggagttctcggaggtgatggtgatccacaggatgtttataaagctggaggagttggacttagggcatctcgaaggagcggagagggtgaagcgcttgtgcgtatttgcagatgtggtggaggtggaagaaggtggcaactttattgacgtggggccagtagcgagattgcctgggtcgatcatggtagtcatactatgccgcgtcctgaaagtcggagtcgtcatgagcgacttttatgtcaataatgccatgcgcctgcagctcccgcacatgaagttgcgtttggtggaggtcacaactcagcccacaggcactaagctgcacatacatcgtgcagatgcagaagattatcaatatcctgccctctgcatacacgccagtgtcatacaatcctccatccgtctcagaagcagctccaataatcgtcctcccaccttccctatccctcttcgattctttaactttaggcccgacagaggatccaacgatgtcgttttctcctccgaatctcggtccctgattgatgagcctgtcaatatcttctatgtatactcccatatgcctgcatttcttcatgcactccccatcccggaggcggccacaattgacccggcctcgctatccagtgattggtattatgtccatctcagccgtgtgaactctgtgttgtcgagctctgttgcggctgaaggagagctggaaccggcattctcactattgaaaccgaaaatcccattcgccgtactaacagatcctaacattttgctcgccatgcagaccagcctccttatcgcagagctagtggagcttgctcacccttcagcagacacagctgatgccgtagccaagcacgtggaatggctcagcaaaatcttgcttcaggctgtgtcgacagatgaggaagggatgttaaatccatctcatgatgagcacctcgcgctcttattccgtgcacaatacctgatgaagatgatgccagggaggacgcgcagcctcgtagtaccacaactgcagtatgacgtttacagcaacctcatcaatcgaatggctcaagtggccgaaagctacgaccaatcactaaggcagtttaaactcttcattgagcaaaacaagattcttggcagctacttgctacaacaaaataaggccttcgctgacagggaaagggatatggatgtttttcattccgagcttatctctcaacggaagattgaactggataacaccttactcaagatggatcaattaagcttacaaatggagactcaaagagaagacatggaccaagccaaaaatgacatggatgccggattgcgggaattccaaaatcgacaagttgcagcagctatgtttgccgtgatcggtgctatcgctgcgattggtcttgcctttgtaaccggtggtgccactgctcctgccgccatggtagcagcaaagaccgccgtgacagcagcgggtgcggctgcacgggcactggagcgagtgatagagatcttggattccttacaagcagtgatggagatggtctctctcataaaggagctggtgagttcgctggaagagataggtcaacttgtggacgcaccagagatgccagagatgccgacagaggcggactggttcatttttgagaacgagatagagggggtggcagagcagatgccaacagaggtgtcggaggtatcggcgtggaaaacgaagtgcaagaatgtggcagtgttggggcgggagatgatcactacggcgtcttatatttcggagctgcaatacgacatcaaggtgcaggcaatgctgcaggagattgccagaagccatgcgaatcggctgtcgagcatccaggcaacagatctgagcaactatacagagatggtgacacagatggacatgcggaccacacgaatgttggtggcgctcatcaaggtggtgcacatgcagaatgcagcactgatgtaccagtgcctatcaccgcccacatatgtgaatgcatggccagtgacaatggagacagtgtggaccatgctggtgcagcacgagcatgcagcggttctgggattgatgaggctagggccctccttcgatttcatgcgcacgtatgtggtggaggggattcctgtgcagctgctgcttgatggggaggattgggagttcgacattccagtggaagattacacaacgttcccgtccacatggtctcgtgtgcgtattcatcacttggaaatgaagtttgtgcaagccgcagatgtgcatcagcctatcactgataccggcacagtttacatgcttctccagggctctcgcatcttccgcgaccgcaaccgagccgatgccattcattacgaggctgccatgtcgcttgactaccactatgcctaccgccttgacacaggagagaccaccctctccaatctgccctcccaagatttcaccagaactttcatgcgcatgacgcccttcacgaactggaggctccgtctgtctgcctctgctgaagaaaacaaagggctccgttttcccacggctacatctgccggctccactacccagattgccgtcattttctatatctcagctatcaggaaaatttctttt

SEQ ID NO: 742 - DNA, 2553 bp, Rumohra adiantiformis
  source 1..2553: mol_type = unassigned DNA
atggattacagcactctttacacggatctgaaccagataagcatgcccctggatcgggtagagttctcagaggtgatggtaatccacaggatgtacttgaggttatctgatctgaatgtgggggagctccccggagccgagagagtgaagcggttgtatgtgtttgcggatgtggtggagctcgcaacatttgcgtatccacagtttcttcatacgcggatgccaggatcggtgacggtgatcattctgtgtcgtcttcttcagtttccaactgatgggtcgttccctgcttggctcgagctgccgttcatggagttacacacactcatagaacaacacaggtcagagataaaagcagcagatgacgcgaactggggaacgtatgtacacgcggaggaagtacagctcagcccgctgtttaatgggtggccttatttggttgttgaggcacagcgctgtattataaccgcggccatgcacaatacatttaaccgcactgggtgggttcgctccgttactcaatttataaatgatcagtccggtcgggtagaaaccacactgctcgcacgaacagaattcggccatatttatctcccactcgagacagattccccaacggcattcagtgtttcacaccgccaaattacgaatttgcccgtagagtacaccggtattccagtagaggtggtgaccgatcctaacatcttgatgggcatgcagactagcgtgcacattgcggagctagtgaaggcatgttacccgtcaccagaattagtgagcgctgtaggggtgcacgtgaattggctcaacgaagtcttgctccgagttgtccagaacgaatctcagttgcaagggaccgaggcctacaacgagtgccttgcgcttttgggtcgcattcaatgtgtcatgaagatggggccgtttgtctcggtagtgccgcagctgcaatacagaatgtatggtagccttatcagacaaatggcccaggtagcacagaactacgaccaagatttcaggcagctcaagttattcattgcccaaaaccaaatccttggcagctatttgctgcagcagaacaaggcatttgctgacagagaggtgcagatggagagctttcattcagcggtcatttctcaaagaaggcaggagttggacgacgccatcgctaagatggaccgactgagcttgcagatggaggaagaggacagagcaatggagcaagcccgaaaagaaatggaagaaggattgaagcagttccagaatgagcaagttgcaagggctgtgttcgctgttcttaaatctgtagctatgattgcgctcgcattcgtcacggctggtgcaacggctcctggggctgcagcatccgcagcgcaagctgtgagcatagccgttcaggccgcacaaggtcttcaaagggtggtggaaattctagaggggctggaggctgtgatggaggttgtggctgctataaaggaccttgtgggtgctctggaccaggtaagtcagattgtggatgcaccacctatgccagacatgccctcggaggcggactggagtatttttgtgaatgagattgaagccgtcgcagaggggatgccgacggaagtctcggaggttccggcgtggaaggccaagtgcaagaatgtggctgcactgggtagggagatgtgcatcacggcagaacagatttcccagctccagtatgacatctgggtgcaaggcttgttgcgggaaatagctcaaagccacgcagaccggctggcagcgattcaacctgctaatcttaccaactatttggagatggcaatacagatggatatgcggactacgaggatactgatagggctcctcaacataatgcgcatccagaatgcggcacttatgtatgagtaccttctaacgcccacgcagctcactgcatggccgctgagaatggatactgtggccaacttgctcatcacgcaggagagtgctgcactgtcaggattagctcagttagggcccccatcggacttcacgagcaggcatgtagtgaaagccatacctgtgagcttgcttctagacggtaaggattgggaatttgagattcctgtgcaaggtggcatgtccagtttcccttccagctggactcgagtgcggattcggcacctggagatgcactttgtgcaggaggcgagcggtggtggcgagattatccaccagcctgccacccagacggggaccgtttacatcctcctgcagggctccactgtcttccatgatcgcagaagggaggaggtgatgacctttcaggcagcggttccgctcaactaccattacgcgtaccgccttgacactggagaagccactcttacgaacgagccctcggaacagtttgccaacacattcatgcagatgacaccgttcactcactggaggctacgtctgtctgcgtccgcagcggagaatgaaggattagcctttcccacagctacagctcccgactccaccactgagattgccatcactttccatgttacggccattagacaaattgactggcggcaagaggag

SEQ ID NO: 743 - DNA, 2553 bp, Rumohra adiantiformis
  source 1..2553: mol_type = unassigned DNA
atggattacagcactctttacacggatctgaaccagataagcatgcccctggatcgggtagagttctcagaggtgatggtaatccacaggatgtacttgaggttatctgatctgaatgtgggggagctccccggagccgagagagtgaagcggttgtatgtgtttgcggatgtggtggagctcgcaacatttgcgtatccacagtttcttcatacgcggatgccaggatcggtgacggtgatcattctgtgtcgtcttcttcagtttccaactgatgggtcgttccctgcttggctcgagctgccgttcatggagttacacacactcatagaacaacacaggtcagagataaaagcagcagatgacgcgaactggggaacgtatgtacacgcggaggaagtacagctcagcccgctgtttaatgggtggccttatttggttgttgaggcacagcgctgtattataaccgcggccatgcacaatacatttaaccgcactgggtgggttcgctccgttactcaatttataaatgatcagtccggtcgggtagaaaccacactgctcgcacgaacagaattcggccatatttatctcccactcgagacagattccccaacggcattcagtgtttcacaccgccaaattacgaatttgcccgtagagtacaccggtattccagtagaggtggtgaccgatcctaacatcttgatgggcatgcagactagcgtgcacattgcggagctagtgaaggcatgttacccgtcaccagaattagtgagcgctgtaggggtgcacgtgaattggctcaacgaagtcttgctccgagttgtccagaacgaatctcagttgcaagggaccgaggcctacaacgagtgccttgcgcttttgggtcgcattcaatgtgtcatgaagatggggccgtttgtctcggtagtgccgcagctgcaatacagaatgtatggtagccttatcagacaaatggcccaggtagcacagaactacgaccaagatttcaggcagctcaagttattcattgcccaaaaccaaatccttggcagctatttgctgcagcagaacaaggcatttgctgacagagaggtgcagatggagagctttcattcagcggtcatttctcaaagaaggcaggagttggacgacgccatcgctaagatggaccgactgagcttgcagatggaggaagaggacagagcaatggagcaagcccgaaaagaaatggaagaaggattgaagcagttccagaatgagcaagttgcaagggctgtgttcgctgttcttaaatctgtagctatgattgcgctcgcattcgtcacggctggtgcaacggctcctggggctgcagcatccgcagcgcaagctgtgagcatagccggtcaggccgcacaaggtcttcaaagggtggtggaaattctagaggggctggaggctgtgatggaggttgtggctgctataaaggaccttgtgggtgctctggaccaggtaagtcagattgtggatgcaccacctatgccagacatgccctcggaggcggactggagtatttttgtgaatgagattgaagccgtcgcagaggggatgccgacggaagtctcggaggttccggcgtggaaggccaagtgcaagaatgtggctgcactgggtagggagatgtgcatcacggcagaacagatttcccagctccagtatgacatctgggtgcaaggcttgttgcgggaaatagctcaaagccacgcagaccggctggcagcgattcaacctgctaatcttaccaactatttggagatggcaatacagatggatatgcggactacgaggatactgatagggctcctcaacataatgcgcatccagaatgcggcacttatgtatgagtaccttctaacgcccacgcagctcactgcatggccgctgagaatggatactgtggccaacttgctcatcacgcaggagagtgctgcactgtcaggattagctcagttagggcccccatcggacttcacgagcaggcatgtagtgaaagccatacctgtgagcttgcttctagacggtaaggattgggaatttgagattcctgtgcaaggtggcatgtccagtttcccttccagctggactcgagtgcggattcggcacctggagatgcactttgtgcaggaggcgagcggtggtggcgagattatccaccagcctgccacccagacggggaccgtttacatcctcctgcagggctccactgtcttccatgatcgcagaagggaggaggtgatgacctttcaggcagcggttccgctcaactaccattacgcgtaccgccttgacactggagaagccactcttacgaacgagccctcggaacagtttgccaacacattcatgcagatgacaccgttcactcactggaggctacgtctgtctgcgtccgcagcggagaatgaaggattagcctttcccacagctacagctcccgactccaccactgagattgccatcactttccatgttacggccattagacaaattgactggcggcaagaggag

SEQ ID NO: 744 - DNA, 2703 bp, Rumohra adiantiformis
  source 1..2703: mol_type = unassigned DNA
atggctgcctccgctgctgctattcccgactacaaggagctgtacagagatttgaaccagataagtgagaggatgaggctggatcagatggatttctcggaggtgatggtgatccaccgcatgtatataaggctggaggagctagacttggggcatctggagggagccgacaaggtgaagcgcttgtacgtgcttgcagatgtggtggaggtggaagaaggtggcaacttcattgagcaagggcctgtagcaagattaccaggctccatcttggttgtcatactctgtagagtcctgcttgtgggcatcgtcatcaacgtgcatagtaatggtgaaaattttaataatgccatgcgcctccagcttccacacttgaagctgcgcgcggtcgagatcagcagcagcaccgacagcaactttaagctggagatgcatcgtgttgatcagacagcaggcgagtacaaccaatatcctgcccttaccgtaaacgcggatcttgtacagtgccgcatgcggtgggttattcatcgaccaccgatcacttccgtcagtttgtctcctatattcgtcgcttttatgccagaccgaggatctggagacgtcatcttttcctccgagtctcggtccatggttgatcgacctgttcagatgttttctgtctactctcacgtccctcgttttattcaaagccgtcccctcccactcccagaggaggtcacaatagacctgtcatcatgggagcccaaggaattttactctctctttgtcagtacagctcccacagtttctttgagcaaaagtgaagcagtagcaggagacctggagccagcgttctcgatattgaaaagaactgttcctgttgtcgtgctgacagatcccaacattttactggccatgcaggccagcctacttatcgcggaactagtgcagattgctcacccttcaccagacacagctgatgctgtagccaagcatgtggaatggctcaacaagctcttgattcaggcggcatcagacacggagggcactccagctcatcacgagtacctggcgctcttgttccgtgcacagtacgtcatgaagaagataggaaggacacgtcacctcgtagtgccgcaattgcaatacgacgtttatagtggtctcatcaatcgaatggctcaagtagctgagagttatgaccaatcactcaggcaatttaaactcttcattcaacaaaacaagattcttgggagctatctgctacagcaaaacagggcctttgctgacaaggaaagggacatggatgtattttattccgagcttatctctcaaagggaggttgaattgcaaagcaccctactaaaaatggatcaactgagctcacagatggagacacaacgcgaagacatggagcaagcgcaaaaagagatggaggaaggattgcgaagattccaaaatagagcagttgcaaatgctatgtttgccgtaattggagctgtggctgcaattggtcttgcattcctaaccggtggtgcaactgctcccggagctatggcagcagcagggaatgctgtgacggcagcgggtcaggctgccagggcgctgcaaagagtgctagatattttggaaggcttgcaagtagtgatggaagtgctgtctattatcaaggaactagtcgcttctttgcaagatctaggtcagcttgtggatgcacccgagatgccggaaatgccactggagtcggactggtacatttttgagaactctattgaggaagtggcggaggggatgccggaggaagtgtcagaggtaacggcatggaagaccaagtgcaagaatgtggcggtgctgggccgagagatgatcaccactgcagtatacatatcgcagctaatgtatgatatcaaggtgcagggcatgctgcaggagattgccaaaagccatgcgcaacggttggagaacatccaagcagcggatctgcaaggctatacagagatggtgacacagatggacatgcggaccacgcgcatgttggtggaactgatcaaggtggtgtatatgcagaatgcagcgcttatgtaccagagtttatcaccacccacagcagtgaatgcatggcccgtgacgatggagacagtgtggagcattctactgcagcatgaccatgctgctttgctggggttgctgaggctagggccttcctttgatttcatgcgcacctacacggtggaggatgttccggtgagcctgttgcttgatggtgaagactggcaattcgagatccctgtgcgagattacacagtctttccctccacctggtcgcgcgtgcgcattcatcacttggagatgaaatttgtcaaagctgctcatgtccaccagcccatcactgatacaggctccatttacgtgcttctgcagggctcgcgcatcttccgcgatcgcaacgaagatgaaaccattgattatgaggctgccctgccgcttgactaccactacgcctaccgccttgacacaggggagaccaccctttccaatctgccctctcaagaattcaccaagaccttcttgcgcatgacgcccttctccaacgcctggagattacgtctgtcttcctctgctgaagaaaacaaagggctggcctttcccactgctacggctgccgactccactacccagattgctatcaccttctacgtcaccgctatccggcgcatttctttc

SEQ ID NO: 745 - DNA, 2703 bp, Rumohra adiantiformis
  source 1..2703: mol_type = unassigned DNA
atggctgcctccgctgctgctattcccgactacaaggagctgtacagagatttgaaccagataagtgagaggatgaggctggatcagatggatttctcggaggtgatggtgatccaccgcatgtatataaggctggaggagctagacttggggcatctggagggagccgacaaggtgaagcgcttgtacgtgcttgcagatgtggtggaggtggaagaaggtggcaacttcattgagcaagggcctgtagcaagattaccaggctccatcttggttgtcatactctgtagagtcctgcttgtgggcatcgtcatcaacgtgcatagtaatggtgaaaattttaataatgccatgcgcctccagcttccacacttgaagctgcgcgcggtcgagatcagcagcagcaccgacagcaactttaagctggagatgcatcgtgttgatcagacagcaggcgagtacaaccaatatcctgcccttaccgtaaacgcggatcttgtacagtgccgcatgcggtgggttattcatcgaccaccgatcacttccgtcagtttgtctcctagattcgtcgcttttatgccagaccgaggatctggagacgtcatcttttcctccgagtctcggtccatggttgatcgacctgttcagatgttttctgtctactctcacgtccctcgttttattcaaagccgtcccctcccactcccagaggaggtcacaatagacctgtcatcatgggagcccaaggaattttactctctctttgtcagtacagctcccacagtttctttgagcaaaagtgaagcagtagcaggagacctggagccagcgttctcgatattgaaaagaactgttcctgttgtcgtgctgacagatcccaacattttactggccatgcaggccagcctacttatcgcggaactagtgcagattgctcacccttcaccagacacagctgatgctgtagccaagcatgtggaatggctcaacaagctcttgattcaggcggcatcagacacggagggcactccagctcatcacgagtacctggcgctcttgttccgtgcacagtacgtcatgaagaagataggaaggacacgtcacctcgtagtgccgcaattgcaatacgacgtttatagtggtctcatcaatcgaatggctcaagtagctgagagttatgaccaatcactcaggcaatttaaactcttcattcaacaaaacaagattcttgggagctatctgctacagcaaaacagggcctttgctgacaaggaaagggacatggatgtattttattccgagcttatctctcaaagggaggttgaattgcaaagcaccctactaaaaatggatcaactgagctcacagatggagacacaacgcgaagacatggagcaagcgcaaaaagagatggaggaaggattgcgaagattccaaaatagagcagttgcaaatgctatgtttgccgtaattggagctgtggctgcaattggtcttgcattcctaaccggtggtgcaactgctcccggagctatggcagcagcagggaatgctgtgacggcagcgggtcaggctgccagggcgctgcaaagagtgctagatattttggaaggcttgcaagtagtgatggaagtgctgtctattatcaaggaactagtcgcttctttgcaagatctaggtcagcttgtggatgcacccgagatgccggaaatgccactggagtcggactggtacatttttgagaactctattgaggaagtggcggaggggatgccggaggaagtgtcagaggtaacggcatggaagaccaagtgcaagaatgtggcggtgctgggccgagagatgatcaccactgcagtatacatatcgcagctaatgtatgatatcaaggtgcagggcatgctgcaggagattgccaaaagccatgcgcaacggttggagaacatccaagcagcggatctgcaaggctatacagagatggtgacacagatggacatgcggaccacgcgcatgttggtggaactgatcaaggtggtgtatatgcagaatgcagcgcttatgtaccagagtttatcaccacccacagcagtgaatgcatggcccgtgacgatggagacagtgtggagcattctactgcagcatgaccatgctgctttgctggggttgctgaggctagggccttcctttgatttcatgcgcacctacacggtggaggatgttccggtgagcctgttgcttgatggtgaagactggcaattcgagatccctgtgcgagattacacagtctttccctccacctggtcgcgcgtgcgcattcatcacttggagatgaaatttgtcaaagctgctcatgtccaccagcccatcactgatacaggctccatttacgtgcttctgcagggctcgcgcatcttccgcgatcgcaacgaagatgaaaccattgattatgaggctgccctgccgcttgactaccactacgcctaccgccttgacacaggggagaccaccctttccaatctgccctctcaagaattcaccaagaccttcttgcgcatgacgcccttctccaacgcctggagattacgtctgtcttcctctgctgaagaaaacaaagggctggcctttcccactgctacggctgccgactccactacccagattgctatcaccttctacgtcaccgctatccggcgcatttctttc

SEQ ID NO: 746 - DNA, 2559 bp, Asplenium trichomanes
  source 1..2559: mol_type = unassigned DNA
atggattacagcacgctttacagggatctgaaccagataagcatgcctgtggatcacgtagagttctcagaggtgatggtgatccatagaatgtatgtgaggttatctgatctggatgtgggggagctcgctggagcagagaaagtgaagcggctgtacttgtttgccgatgtggtggagcttgcaccggagcttgcaccggggaaacggacgcaaatgccaggatcgatcacggtgatcatattgtgtcgtcttcttcaatttccaactgatgggtcgcgagctgcaactctccagctgccgttcatgaagttgcatgccatactcagagagcgatataggtcagagataacagcagcagatggcacgaattggggaacgtacatccacggagacgaagtacaggtcagcccgctgtatactaacaattcggtacttccggtttgggcagatcgctctattataacctcagcctttcacaatgtgcttgacgaacctggtagagtaatttccagtactagtattacaatggctcaggcagcaccgaataatacgcgtatgacagccgaacccggttgggtctttggtaatcgttttctactctacacagtttcttcgacggcattcagtgttttacctctccaaagtacgaatatatccttcacaagcattccggtagaggtggtggctgatcctaacatcttgctgggcatgcagaccactgtgcacattgctgagctagtcaaggcatgtcgcccgtcacccgacatagtgagcgctgtagggcagcacgtgatttggctcaacaaagtcttgctccatgttgtgcagaacgaatctcagttgcaagggaccgaatcctacaacgagtgccttgcacttttgggtcgtgttcaatctgtgatgaagatcggcagatctggctcagtagtgccccagctgcaatacagaatgtatggtagcctcatcaaacaaatggcccaagcagcacaaaactatgaccaagaattcaggcagttcaagttattcatcatccaaaaccaaatcctgggcagctatttgctgcagcagaacaaggcatttgccgacagggagctgcagatggagagctttcattcagcggtcatttctcaaagaatgcaggagttggacactgccatcgcaaagatggaccgattgagcttgcaaatggaggaagagaacaaagcaatggagcaagcccagagggagatggacgaaggattgaggaggttccggaatgaacaagtcgcaagggccgtattttctgttcttagagctgtagctatgattgccctcgcattcgtcacgggtggtgcaacggctcctggagctgcggcgtccgcggggcaagccgtgagcatagcaggtcaggccgcacaagctctgcaaagggtggtggaaattctagatcggctggaggcggtgatggaggttgtggctgctgtgaaggaccttgtggattcattggaacaggtaggtcagattgtggaggcaccggtgatgccggacatgccctcggaggcggactggtccatttttgtgaatgagatcgaggctgtcgcagaggggatgccgacagaagtctcggaggttccggcgtggaaggccaagtgcaagaatgtggctgcactgggtagggagatgagcatcacggcagtacagatttctgagctccagtatgacatctgggtgcacggcttgatgcgggacatggctcgaagtcaggcagacaggctggcggcaattcaacccgcagaccttaccaactatttggagatggcaacacagatggatatgcggactacaaggatgctactagggctgctcaacatgctgcacatccagaatgcggcactcatgtacgagtaccttctgacgcccacagagctcacagcatggccgctgggcatggatatcgtggccaacttgctcatcgcgcaggagaatgctgcactgttaggattagttcagctagggcccccatcggatttcacgagcaagcatgtggtgaaaggcatacctgtgagcttgctgctcgacggtgaggattgggagttcgagatccctgtggaaggtggcatgtccagcttcccttctagctggactcgcgtacggattcggcacctggagatgcactttgtgcaggagatgagcggtggcagcgagattatccaccagcctgccacccagacggggactgtttacatcctcctgcagggctccactaccttccatgaccgcagaagggacgaggtgatgacctttcaggcagcggctccgctcaactaccattacgcgtaccgccttgacactggcgaagccactcttacgaacgagccctcggaacagtttgccaacacattcatgcagatgacacccttcacgcgctggaggcttcgtctctctgcgtctgccgcagagaatgcaggattaggctttcccacagctacagctcccgactccacgaccgagatagtcatcacgttccatgttacggccattagacaaattgactggcggcacgaggaggaggaggag

SEQ ID NO: 747 - DNA, 2481 bp, Asplenium trichomanes
  source 1..2481: mol_type = unassigned DNA
atggattacagcacgctttacagggatctgaaccagataagcatgcctgtggatcacgtagagttctcagaggtgatggtgatccatagaatgtatgtgaggttatctgatctggatgtgggggagctcgctggagcagagaaagtgaagcggctgtacttgtttgccgatgtggtggagcttgcaccggagcttgcaccggggaaacggacgcaaatgccaggatcgatcacggtgatcatattgtgtcgtcttcttcaatttccaactgatgggtcgcgagctgcaactctccagctgccgttcatgaagttgcatgccatactcagagagcgatataggtcagagataacagcagcagatggcacgaattggggaacgtacatccacggagacgaagtacaggtcagcccgctgtatactaacaattcggtacttccggtttgggcagatcgctctattataacctcagcctttcacaatgtgcttgacgaacctggtagagtaatttccagtactagtattacaatggctcaggcagcaccgaataatacgcgtatgacagccgaacccggttgggtctttggtaatcgttttctactctacacagtttcttcgacggcattcagtgttttacctctccaaagtacgaatatatccttcacaagcattccggtagaggtggtggctgatcctaacatcttgctgggcatgcagaccactgtgcacattgctgagctagtcaaggtgcagaacgaatctcagttgcaagggaccgaatcctacaacgagtgccttgcacttttgggtcgtgttcaatctgtgatgaagatcggcagatctggctcagtagtgccccagctgcaatacagaatgtatggtagcctcatcaaacaaatggcccaagcagcacaaaactatgaccaagaattcaggcagttcaagttattcatcatccaaaaccaaatcctgggcagctatttgctgcagcagaacaaggcatttgccgacagggagctgcagatggagagctttcattcagcggtcatttctcaaagaatgcaggagttggacactgccatcgcaaagatggaccgattgagcttgcaaatggaggaagagaacaaagcaatggagcaagcccagagggagatggacgaaggattgaggaggttccggaatgaacaagtcgcaagggccgtattttctgttcttagagctgtagctatgattgccctcgcattcgtcacgggtggtgcaacggctcctggagctgcggcgtccgcggggcaagccgtgagcatagcaggtcaggccgcacaagctctgcaaagggtggtggaaattctagatcggctggaggcggtgatggaggttgtggctgctgtgaaggaccttgtggattcattggaacaggtaggtcagattgtggaggcaccggtgatgccggacatgccctcggaggcggactggtccatttttgtgaatgagatcgaggctgtcgcagaggggatgccgacagaagtctcggaggttccggcgtggaaggccaagtgcaagaatgtggctgcactgggtagggagatgagcatcacggcagtacagatttctgagctccagtatgacatctgggtgcacggcttgatgcgggacatggctcgaagccaggcagacaggctggcggcaattcaacccgcagaccttaccaactatttggagatggcaacacagatggatatgcggactacaaggatgctactagggctgctcaacatgctgcacatccagaatgcggcactcatgtacgagtaccttctgacgcccacagagctcacagcatggccgctgggcatggatatcgtggccaacttgctcatcgcgcaggagaatgctgcactgttaggattagttcagctagggcccccatcggatttcacgagcaagcatgtggtgaaaggcatacctgtgagcttgctgctcgacggtgaggattgggagttcgagatccctgtggaaggtggcatgtccagcttcccttctagctggactcgcgtacggattcggcacctggagatgcactttgtgcaggagatgagcggtggcagcgagattatccaccagcctgccacccagacggggactgtttacatcctcctgcagggctccactaccttccatgaccgcagaagggacgaggtgatgacctttcaggcagcggctccgctcaactaccattacgcgtaccgccttgacactggcgaagccactcttacgaacgagccctcggaacagtttgccaacacattcatgcagatgacacccttcacgcgctggaggcttcgtctctctgcgtctgccgcagagaatgcaggattaggctttcccacagctacagctcccgactccacgaccgagatagtcatcacgttccatgttacggccattagacaaattgactggcggcacgaggaggaggaggag

SEQ ID NO: 748 - DNA, 2712 bp, Asplenium scolopendrium
  source 1..2712: mol_type = unassigned DNA; note = Phyllitis scolopendium 'Angustifolia'
atgggtgtcacagtcgttagcgacgagctgtgtctgctggacttggacgaagggagcgaggaatgggtgaaggatgaggaggcgataaaggcagcgaggagtagtacacctgaggtgaactacgaggccctgtatgcgaatgcaaaccagatagcgcgcgacctgcgagtggggagtgtgccatgtggagagctcctttctgtcaacggccggatgtttgtgcggctggacagcctggatgtgagccggctgcggcaacccgagcgagtgcagaacctcattgtgctggcagacgttgtggagatttctggcagggatctggtgctcccgggcgcctcctccgtgcgcatcatctgccggatcctccatctcagaagccgagacgtgcagctggaccttccttacgcgtggcgcacttcttcacaaacccagccctttcaattctccctccgtgcgcagcaaattgtcgtgtcgccctctgctgcgcctcccagcctttcctctactggtgccttagtggttcggctgcaccgcgagttaaatcaatgggctaccacaagaaccaggttcactcaatatgtcgtccgatgctttggctacacggcaagtagtgtaaactctaccgtcaatatcaacatccctgtctcagcagagacgccaccatcctttcactggctccgtgtgaactccgagaatctgaacctcaaggtcaaccaggatgctgtgtggcgtgcccatgtcgacgtccaggttgcgttgccgtcacagctggatctcaatgacctgcatgtcatgatgggtatggagtctaccctgctgactgcagagatgattcttagctatcgatcagatcgcccggacgttgttgctctggcagtagagcatgttgaatggatcagaatgagcttggtgcagaatcatgagcaacaacctaatcttcctgacaaccaatttgcactacttgctcgagcggaaatgcttgcaaaattgtcgatagatggaagccaaagcctggttgtcccgcagcttgagtacaccgcgtacagcgaagtgatcagacaaatcgctgttgtggccgaagcatacaatcaggaattcacacagctgcatctctttgtacaacaaactacgatacttggtgactatgttctcaatacagtgaaagctcttgctgagaaggagaaagacatcgccctcctggaggaggctgttgtgcgtggcaagcagtccgagctcgacattgccgtcgagaaaatagagaggttagagcaacaaatcctgaagcaaattgaagaggtgcaagaagccaaggaagacatggagaaaggtatcatcgcatacaggaatcggctgatcgcaaatgccttctttgaagtcctcagtgctgtcctacaaattgcagggtcatttgtgtattttaagacaggccaaattactgatgggctagcagcattgggaggaggtctcgcatccgcaaatcaggcaatctggctgatagtggatgcagtagacgcaaaaaattcactaagcaacatcaccgacaacctggtcgatgtggaaaaggcaatgaaagtggtgaacgctgtgctcgcattggtggataccgtcacaaacctggatgagctcttggatgctccacggatgcctgacgttgactcctcacattgggacatcatggagaacgagatcgagatagtggcagcgcaactgcccaccgaggtcagcgaggtccgggtgtggagcctcaaatgcaggaacgtggtgatcgtgtgccgtgaggtttgcacaactgctgctgccataatgcagctgcaatacgagctctttgtgcatgcaaggaagaaagagatttctgaaaggcatgcggagcgcttggcgcagatccaagcggtagacctgggggactacttggagctggcaagccaggctgacatgcgcacggtgcgactgctcatacagctactggacctgctggctacccagaacggagctctgcaatatcactacctactgccaccggagccattcgttggctggcctaccatagacaatgtgaggagaatgctggtggcacggcagcaacaagctgtcatttcacaaaccagcctaggtccgtcctaccgtgtcaggacacgcttggtgctcgattctgtccccgtgggcttgctactctctggtgaggactatagcttcacaatcgcgccgatcagcgagcaaagcatcccggtcttccccgctgtctggtcgcgtgtgcgcatcgaagagttgcaaatggtgttcactgccggtactacaggggcgcacatgccagtggctggtcccggcggcaaggtctacttactattacagccatcgtctacgttccacgatcggctgcgctaccaggccttcaactaccaggcggctgctccacggccgttccagtatgtatatgaccttgcgaccggcgagccatcgctggtgagcaggcccagtgagccaggcctctttctgcgcatgacaccgttcacacgctggaggcttcggctttcggcctccgcgtaccagaacgaagggatctccttccccaccgccactgcagccgacagcgtggccgaaatcaccatcaccttcgagcttacggctattgtccatccacaatcttttctcgaggaggatggcatcacgttcctcatgccgggcaagggtggcgatgatcaggtcgtcagctaa

SEQ ID NO: 749 - DNA, 2712 bp, Asplenium scolopendrium
  source 1..2712: mol_type = unassigned DNA; note = Phyllitis scolopendium 'Angustifolia'
atgggtgtcacagtcgttagcgacgagctgtgtctgctggacttggacgaagggagcgaggaatgggtgaaggatgaggaggcgataaaggcagcgaggagtagtacacctgaggtgaactacgaggccctgtatgcgaatgcaaaccagatagcgcgcgacctgcgagtggggagtgtgccatgtggagagctcctttctgtcaacggccggatgtttgtgcggctggacagcctggatgtgagccggctgcggcaacccgagcgagtgcagaacctcattgtgctggcagacgttgtggagatttctggcagggatctggtgctcccgggcgcctcctccgtgcgcatcatctgccggatcctccatctcagaagccgagacgtgcagctggaccttccttacgcgtggcgcacttcttcacaaacccagccctttcaattctccctccgtgcgcagcaaattgtcgtgtcgccctctgctgcgcctcccagcctttcctctactggtgccttagtggttcggctgcaccgcgagttaaatcaatgggctaccacaagaaccaggttcactcaatatgtcgtccgatgctttggctacacggcaagtagtgtaaactctaccgtcaatatcaacatccctgtctcagcagagacgccaccatcctttcactggctccgtgtgaactccgagaatctgaacctcaaggtcaaccaggatgctgtgtggcgtgcccatgtcgacgtccaggttgcgttgccgtcacagctggatctcaatgacctgcatgtcatgatgggtatggagtctaccctgctgactgcagagatgattcttagctatcgatcagatcgcccggacgttgttgctctggcagtagagcatgttgaatggatcagaatgagcttggtgcagaatcatgagcaacaacctaatcttcctgacaaccaatttgcactacttgctcgagcggaaatgcttgcaaaattgtcgatagatggaagccaaagcctggttgtcccgcagcttgagtacaccgcgtacagcgaagtgatcagacaaatcgctgttgtggccgaagcatacaatcaggaattcacacagctgcatctctttgtacaacaaactacgatacttggtgactatgttctcaatacagtgaaagctcttgctgagaaggagaaagacatcgccctcctggaggaggctgttgtgcgtggcaagcagtccgagctcgacattgccgtcgagaaaatagagaggttagagcaacaaatcctgaagcaaattgaagaggtgcaagaagccaaggaagacatggagaaaggtatcatcgcatacaggaatcggctgatcgcaaatgccttctttgaagtcctcagtgctgtcctacaaattgcagggtcatttgtgtattttaagacaggccaaattactgatgggctagcagcattgggaggaggtctcgcatccgcaaatcaggcaatctggctgatagtggatgcagtagacgcaaaaaattcactaagcaacatcaccgacaacctggtcgatgtggaaaaggcaatgaaagtggtgaacgctgtgctcgcattggtggataccgtcacaaacctggatgagctcttggatgctccacggatgcctgacgttgactcctcacattgggacatcatggagaacgagatcgagatagtggcagcgcaactgcccaccgaggtcagcgaggtccgggtgtggagcctcaaatgcaggaacgtggtgatcgtgtgccgtgaggtttgcacaactgctgctgccataatgcagctgcaatacgagctctttgtgcatgcaaggaagaaagagatttctgaaaggcatgcggagcgcttggcgcagatccaagcggtagacctgggggactacttggagctggcaagccaggctgacatgcgcacggtgcgactgctcatacagctactggacctgctggctacccagaacggagctctgcaatatcactacctactgccaccggagccattcgttggctggcctaccatagacaatgtgaggagaatgctggtggcacggcagcaacaagctgtcatttcacaaaccagcctaggtccgtcctaccgtgtcaggacacgcttggtgctcgattctgtccccgtgggcttgctactctctggtgaggactatagcttcacaatcgcgccgatcagcgagcaaagcatcccggtcttccccgctgtctggtcgcgtgtgcgcatcgaagagttgcaaatggtgttcactgccggtactacaggggcgcacatgccagtggctggtcccggcggcaaggtctacttactattacagccatcgtctacgttccacgatcggctgcgctaccaggtcttcaactaccaggcggctgctccacggccgttccagtatgtatatgaccttgcgaccggcgagccatcgctggtgagcaggcccagtgagccaggcctctttctgcgcatgacaccgttcacacgctggaggcttcggctttcggcctccgcgtaccagaacgaagggatctccttccccaccgccactgcagccgacagcgtggccgaaatcaccatcaccttcgagcttacggctattgtccatccacaatcttttctcgaggaggatggcatcacgttcctcatgccgggcaagggtggcgatgatcaggtcgtcagctaa

SEQ ID NO: 750 - DNA, 2628 bp, Asplenium scolopendrium
  source 1..2628: mol_type = unassigned DNA; note = Phyllitis scolopendium 'Angustifolia'
atggagtatggcagcttgtatggtgatgtgaaccaggtgagcctgaggttcgagaatacggaggtctctgaggtgatggtggtgcatcggatgcatgtgcggctggaggagctggacatgagcaacgacaagctcaaacgcctgtacgtgctggcggacgtggtggagctgccttcccagcgtaaaactatcgttatccccgccaccgtttcggcgataatcatgtgccgtgttctctacatcccttacatctggaccgtgtttgacaactgcaccgtcctcctcccgcacatgcgcttccgggtcgtcgaaacaagcctcacgctcagaactggccaattctttgccttaccctcctctgacaccgtcgacaacggcgccggcagctttggcggcctctacatccatgccgaccgcttcatctaccgccaggccacatcgtttacctccgactgggtccagcctctgcaacttcgggtacgaggcagctccaccttctcctcaaccttccgtgatcctgactggccagaaaccctacctgtcaccaacctcaatcaaaccatcaccctctccttgggctcattcctcacaccctccgactctgacttgcagagatctgacgagattgagttcctgcagacggagccccagagagtgcaagtggtatttaaccgacccggcggcacgaccggcgtggctttactcgtcgagaactcccctgaaatcagctttttccctgcaccatcgctggaacatgtccctgcagacgtcctcgccgatccttccatcatcttgggcatgcaaatgaacatgctcagtgccgagcttgtccgggctgctcacaattcgcagcaagtcatcaaagctgtcactaagcatgtggaatggctcagcaagatcttgcttcaggttgcttcaccgagtgatgacattctagcgctcttgtttcgcgtgcaagcattcattaagatggcaaagcaatcgcgctttgtggttccacggttacaataccacgtgtacagtaaccttatcaatcggatggtgcaagtagcccaggattatgaccaggagttcaggcaactcagacttttcattgcacaaaatgagatattgggaagctatttgctacagcaaaataaggctttcgcagataaggagaaggacatgagtgctttccactcgcaagttgtgtctatgaggagatccgagctgacctctaccatagaaatgatgggcaggctgagcttgcaaatggaaacggagggtgaggcgatggacgaagccagggacagtatggtcgaagcaattcaagaatatgaaaggaaacaacttgcaagggctctatttgcagtgcttggggcaatagcaagtgttgctcttgcatttgccactggaggtgcaactgcaccagcggcagtggcagcagctggagcggcagtcactgcagcaggtagattggcagaaggcctccgaagggttgtggagatcctcgaaggcttgcaagcgatcatggaggttgtggcagctataagagatctcgtagaatcactggaaaacatgggtcaactagtaggagctccggaaatgccagagatgcctacaaatgcagactggttaatttttgtaaatgaggtggaggcagtggcagagcaagtgccagaagaagtgtcagaggtcccagtgtggaaggccaagtgcaagaatgtggcggtgctagggcaagagatgtgcacaacagcagcacatattagcgagctacagtatcagataagggtggaagagatgctacaggagattgcacaacgtcaagcagacaggctaatggggatatcagcagcagatctatcaagctacacggagatggcaacacagatagacatgcgtacaactcggatgctccttcagctcatcaagatgttgtacattcagaatgctgcaatcaagtacgagtacttgtacgctgcgagtgagcggcttaactcatggccagtgaccatgcagacagtatggaccatgctcttgcaacaagagaatgcagctatcttgggcttgctagacttggggccctctaatgatttcacagtaacacatgttgttaaagacataccggtcaagttgttagttgatggttacgattggcattttgagatccctgtggaggattccgcaatcttcccggcaggatggtctcgtgttcggatacgctatgtcgagcttaaatttggcaaacagggtactgacagtaacattgtcatccaccagcctagcactaatactggcctaatctacgtgctcttacaaagctctcgtttcctcagtgatcgcaaacgggaggaggtgatggactatgaggcaagcacgggacttgcatatgcgtacgcctatgacctcagcacgggtgcaaccactctaactaacatcccctcagaggcacatgccaacacatttatgcaaatggcacccttcactgcctggaggcttcgtctctctgcctctgctatggaaaatcagggactggtgtttcctacagccacttctccggacaatactacccaaatctccatcacattctatgtcactgctattcgacggatagatactcgtcgacaacgagctgatgcggagtta

SEQ ID NO: 751 - DNA, 2652 bp, Asplenium scolopendrium
  source 1..2652: mol_type = unassigned DNA; note = Phyllitis scolopendium 'Angustifolia'
atggagtactccgacttgtatgaggatgtgaaccaggtaagcttacgcttccagcagactgagttctccgaggtcatggtggtccatcgcatgtacttccgccttcttgacctcgacatgagcaccggaccctctttccttatgtttcccggcagcgagaaggtgcgccgcctctacatcgttgccgacattgtcgagcttcccgccaatggcatcaacatgcggcttcccgccaccgtatccgtcgtcatcctctgccgggttctctatgttcaggatgtcaactcgccctttctcacatgcggcctccatttccccttgatgcgcatgcgtgtggtggagacccaagagggcacggtccgtgtctttccggtccccgatagttcctcctcctccggaggtagtaccgacattggcctcttcatccacgccgatcgcttcatctaccggcaggacacctctacccttgaccctcttcagcccctgcaattgagagtgatcggaggttctacattctccacagtccgccctggttggccagaaactcttgaggtattctccctcattttgtggctcactctgtccaaggggcagcccattcctgccacagaatctgatttgcagagatctgacgaggttgagcttctgcccccaccttcccccgaccgactcctcgtagtctttaccggcctcgcacctggaaacatcggcagtatgtctgtggatgttgagtatatcggtgctggatttagctacttcagtatacccccggtggaccctgtccccacggaagttctctccgacccatacatcatcctgggcctacaaatgaacatgctcattgcagagcttgtcctggctgctcacaattctccgcgggtcatcaatgttgtcacgaagcatgtggaatggcttaacaagatattgcggcccaagcttgatttaccgaacgatgatattttaggacttctgtttcgtgtccaaaccttcttgaagatggctaagcagcctcgatctgtagtaccacggttgcaataccacatgtacagtagcctcatcaatcgcatggtgcaagtagcccaggtttacgatcaagatttcaagcaactcaaactcttcattgcgcaaaatcagatccttggcagctacttgttagaacaaaataaggcatttgcaagtaaagagaaggacatgagctctttccactctcaagtcgtgtcgctgcggagaaccgagctcaacaacgcaatagataagatggaccaattgagtgtgcaaatggaaaacgagaatcaagcaatggaccaggccaaagaggacatgatgcaagccattgaagaatatgagaagaagcaactcgccaacgctctttttgctgtgcttggagcgatagcgagtgttgcccttgcctttgcgacagctggtgcaaccgcacctgcggctgtggcggctgcgggggcagctgtgagtgcagcaggcagattggccgaaggtttgaaaaaagttgttgaaatattggaagggctggcagcagtgatggagattgttgcagtcataagggagcttgtagagtcactgcagaaccttggaagtctgattgacacaccggacatgccagacatgccatcggatgcagactggttgatctttgtgaatgaggtggaggctgttgcagagcaaatgccagcagatgtggttggttcggtggctgtgtggaaggcgaagtgcaagaacgtggctgtgcttgggcaggagatgtgcaccacagcggcacacatcggagagttaacataccagataaaggtggaagaaatgctacaagagattgcacaaaaacaagcaaacaggttggagggaataacacctgcagacttatcaagctacacagaaatgctttcacagatagacatgcgcaccactcgacagctgcttcagctcatccgggtgttgaacatccaaaatgcagcaatcaagtacgagtacttgtatgttgcaagcaggcagttggattcatggccggtgagtatggatactgtttggagcatgctcttgcagcaagagacctcagctatcacaggcttgttagacctgggaccctctaccgatttcacacgcacctttgtcgtcaaaaacattccggtgggactcttagttgatggtagagattggcagttcgtcatccccgtggaggattctccgacctttcccatcgggtactctcgtgttcgcatacgttatgtcgagctgaaattcgagcaagacagtaatgatggcagtgtcatccaccagcctcgcacaaacagcggcttgatatacatgctcttacaaaactctcaattgtttagtgatcggaggcggagggagatactggactatgaggcaagcatgggacttgcatatgcatttgcatacaatcttaccacgggagtgcctactctcaccaacatcccctccgatgagcatgccaacactttcatgcgaatgacgcccttcaataattggcgacttcgactctcttcctctgctgaggaaaatcggggattggcatttcccacggccaattctctagatgatatcacccaagtttccatcacattctacattactgctattcgtggaatagatacccgccgggaagtcgatgaggagtga

SEQ ID NO: 752 - DNA, 2640 bp, Asplenium scolopendrium
  source 1..2640: mol_type = unassigned DNA; note = Phyllitis scolopendium 'Angustifolia'
atggagtatggcagcttgtatggtgatgtgaaccaggtgagcctgaggttcgagaagacggaggtctctgaggtgatggtggtgcatcggatgcatgtgcggctggaggagctggacatgagcagcgacaagctcaaacgcctgttcgtgctggcggacgtggtggagctgccttcccagcgtaaaactatcgttatccccgccaccgtttcggtgataatcatgtgccgcattctctacatcccttacatctggaccgtgctcgacaactgcaccgtcctcctcccgcacatgcgcttccgggtcgtcgaaacaagcatcgcgcccagagctggccaattctttgccttaccctcctctgactccgtcgacaacggcgccggcagcgttggcggcctctacatccatgccgaccgcttcatctaccgccagggcacatcgtttacctccgactggagccactccgactgggtccagcctctgcaactccgggtacaaggcagctccaccttctcctcaaccttccgtgatcctaactggccagaaaccctacctgtcaccaacctcaatcaaaccctcagcctctccttgggctcattcctcacaccctccgactctgacttgcagagatctgacgagattgagttcctggcgacggagccccagagagtgcaagtgatatttaaccgacccggcggctcgaccggcgtgcttttattcgtcgagaactcccctgaaatcagctttttccctgcaccatcgctgcaacatgtccctgcagacgtcctcgccgatccttccatcatcttgggcatgcaaatgaacatgctcagtgccgagcttgtcctggctgctcacaattcgcagcaagtcatcaaagctgtcactaagcatgtggaatggctcagcaagatcttgcttcaggttgcttcaccgagtgatgacattctagcgctcttgtttcgcgtgcaagcattcattaagatggcaaagcaatcgcgctttgtggttccacggttacaataccacgcgtacattaaccttatcaatcggatggtgcaagtagcccaggattatgaccaggagttcaggcaactcaggcttttcattgcacaaaatgagatattgggaagctatttgctacagcaaaataaggctttcgcagataaggagaaggacatgagtgctttccactcgcaagttgtgtctatgaggagatccgagctgacctctaccatagaaatgatgggcaggctgagcttgcaaatggaaacggagggtgaggcgatggacgaagccaaggacagtatggtcgaagcaattcaagaatatgaaaggaaacaacttgcaagggctctatttgcagtgcttggggcaatagcagctgttgctcttgcatttgccactggaggtgcaactgcaccagcggcagtggcagcagctggagcggcagtctctgcagcaggtagattggcagaaggcctccgaagggtcgtggagatcctccaaggcttgcaagagatcatggaggttgtggcagctataagagatctcgtagaatcactggaaaacatgggtcaacttgtagcagctcctgaaatgccagagatgcctacaaatgcagactggttaatttttgtaaatgaggtggaggcagtggcagagcaagtgccagaagaagtgtcagaggtcccagtgtggaaggccaagtgcaagaatgtggcggtgctagggcaagagatgtgcacaacagcagcacatattagcgagctacagtatcagataagggtggaagagatgctacaggagattgcagaacgtcaagcagacaggctaatggcgatatcagcagcagatctttcaagctacacggagatggcaacacagatagacatgcgtacaacgcggatgctccttcagctcatcaagatgttgtacattcagaatgctgcaatcaagtacgggtacttgtaccctgcgagtgagcggcttaactcatggccagtgaccatgcagacagtatggaccatgctcttgcaacaagagaatgcggctatcttgggcttgctagacttggggccctctaatgatttcacagtaacacatgttgttaaagacataccggtcaagttgttagttgatggttacgattggcattttgagatccctgtggaggattccgcaatcttcccggcaggatggtctcgtgttcggatacgctatgtcgagcttaaatttggcaaacagggtactgacagtaacattgtcatccaccagcctagcactaatactggcctaatctacgtgctcttacaaagctctcgtttcctcagtgatcgcaaacgggaggaggtgatggactacgaggcaagcacgggacttgcatatgcgtacgcctataacctcagcacgggtgcaaccactctaactaacatcccctcagaggcaaatgccaacacatttatgcaaatggcacccttcactgcctggaggcttcgtctctctgcctctgctatggaaaatcagggactggtgtttcctacagccacttctccggacaatactacccaaatctccatcacattctatgtcactgctattcgagggatagatcgtcgacaaggagctgatgcggagtta

SEQ ID NO: 753 - DNA, 2640 bp, Asplenium scolopendrium
  source 1..2640: mol_type = unassigned DNA; note = Phyllitis scolopendium 'Angustifolia'
atggagtatggcagcttgtatggtgatgtgaaccaggtgagcctgaggttcgagaagacggaggtctctgaggtgatggtggtgcatcggatgcatgtgcggctggaggagctggacatgagcagcgacaagctcaaacgcctgttcgtgctggcggacgtggtggagctgccttcccagcgtaaaactatcgttatccccgccaccgtttcggtgataatcatgtgccgcattctctacatcccttacatctggaccgtgctcgacaactgcaccgtcctcctcccgcacatgcgcttccgggtcgtcgaaacaagcatcgcgcccagagctggccaattctttgccttaccctcctctgactccgtcgacaacggcgccggcagcgttggcggcctctacatccatgccgaccgcttcatctaccgccagggcacatcgtttacctccgactggagccactccgactgggtccagcctctgcaactccgggtacaaggcagctccaccttctcctcaaccttccgtgatcctaactggccagaaaccctacctgtcaccaacctcaatcaaaccctcagcctctccttgggctcattcctcacaccctccgactctgacttgcagagatctgacgagattgagttcctggcgacggagccccagagagtgcaagtgatatttaaccgacccggcggctcgaccggcgtgcttttattcgtcgagaactcccctgaaatcagctttttccctgcaccatcgctgcaacatgtccctgcagacgtcctcgccgatccttccatcatcttgggcatgcaaatgaacatgctcagtgccgagcttgtcctggctgctcacaattcgcagcaagtcatcaaagctgtcactaagcatgtggaatggctcagcaagatcttgcttcaggttgcttcaccgagtgatgacattctagcgctcttgtttcgcgtgcaagcattcattaagatggcaaagcaatcgcgctttgtggttccacggttacaataccacgcgtacagtaaccttatcaatcggatggtgcaagtagcccaggattatgaccaggagttcaggcaactcagacttttcattgcacaaaatgagatattgggaagctatttgctacagcaaaataaggctttcgcagataaggagaaggacatgagtgctttccactcgcaagttgtgtctatgaggagatccgagctgacctctaccatagaaatgatgggcaggctgagcttgcaaatggaaacggagggtgaggcgatggacgaagccaaggacagtatggtcgaagcaattcaagaatatgaaaggaaacaacttgcaagggctctatttgcagtgcttggggcaatagcagctgttgctcttgcatttgccactggaggtgcaactgcaccagcggcagtggcagcagctggagcggcagtctctgcagcaggtagattggcagaaggcctccgaagggtcgtggagatcctccaaggcttgcaagagatcatggaggttgtggcagctataagagatctcgtagaatcactggaaaacatgggtcaacttgtagcagctcctgaaatgccagagatgcctacaaatgcagactggttaatttttgtaaatgaggtggaggcagtggcagagcaagtgccagaagaagtgtcagaggtcccagtgtggaaggccaagtgcaagaatgtggcggtgctagggcaagagatgtgcacaacagcagcacatattagcgagctacagtatcagataagggtggaagagatgctacaggagattgcagaacgtcaagcagacaggctaatggcgatatcagcagcagatctttcaagctacacggagatggcaacacagatagacatgcgtacaacgcggatgctccttcagctcatcaagatgttgtacattcagaatgctgcaatcaagtacgggtacttgtaccctgcgagtgagcggcttaactcatggccagtgaccatgcagacagtatggaccatgctcttgcaacaagagaatgcggctatcttgggcttgctagacttggggccctctaatgatttcacagtaacacatgttgttaaagacataccggtcaagttgttagttgatggttacgattggcattttgagatccctgtggaggattccgcaatcttcccggcaggatggtctcgtgttcggatacgctatgtcgagcttaaatttggcaaacagggtactgacagtaacattgtcatccaccagcctagcactaatactggcctaatctacgtgctcttacaaagctctcgtttcctcagtgatcgcaaacgggaggaggtgatggactacgaggcaagcacgggacttgcatatgcgtacgcctataacctcagcacgggtgcaaccactctaactaacatcccctcagaggcaaatgccaacacatttatgcaaatggcacccttcactgcctggaggcttcgtctctctgcctctgctatggaaaatcagggactggtgtttcctacagccacttctccggacaatactacccaaatctccatcacattctatgtcactgctattcgagggatagatcgtcgacaaggagctgatgcggagtta

SEQ ID NO: 754 - protein, 846 aa, Polystichum luctuosum
  source 1..846: note = Polystichium tsus-simense
MDYSTLYRDLNQVRVPVDRAEFSEVMVIHRMYVRLSDLDVGELVGAERVKRLYVFADVVELVPQTVWFRQIQMPGSVTVIILCRLLQFPTVGSQAETLQLPFMRLQAIVKEQNRSEITAADGMKWGTYIHGNEVQLRSNNSRFDVWAPRSIITSAIHNVLNEPGRLASNTVIARAQGAVTTTRMSAWLSHQGFVLPTVSPTAFSVLPLQSTNVSFTSIPVEVVTDPNILLGMQTTLHIAELVKVCHPSPDIVSAVAEHAIWLSKVLLQVVQNESQLQGTESYNECLALLGRVQSVIKMGRFGSVVPQLQYRMYGSLINQMAQVAQNYDREFKQFKLFIIQNQILGSYLLQQNKAFADRELQMESFHSAVISHRAQELDTAIAKMDRLSLQMEEENRAMEQAEKEMNEGLRRFQNEQVARAIFSVLRAVAMIGLAFVTGGATAPAAVASAGQAVSIAGQAAQALRRVVEILEGLAAVMEVVAAVKELVASLEQVGQIVDAPEMPDMPSEADWSIFVNEIEAVAEGMPTEVSEVPTWKAKCKNVAALGREMSITAVQISELQYHIWVQGLMRDIARSQADRLAAIQPVDLTNYLEMATQMDMRTTRMLIGLLNMLRIQNAALMYEYLLTPMELTAWPLEMDTMANLLIEQENSALLGLIQLGPSSDFTSRHVVKGIPVSLLLDGEDWEFEIPVQRGMSSFPFSWTRVRIRHLEMHFVQEASSGGEIIHQPATQTGTVYILLQGSTIFHDRRRDEVMTFQAADPLNYQYAYRLDTGEATLTNEPSEQFANTFMQMTPFTRWRLRLSASAKENAGLAFPTATAPDSTTEIVITFHVTAIRQIDWRQEVEE

SEQ ID NO: 755 - protein, 846 aa, Polystichum luctuosum
  source 1..846: note = Polystichium tsus-simense
MDYSTLYRDLNQVRVPVDRAEFSEVMVIHRMYVRLSDLDVGELVGAERVKRLYVFADVVELVPQTVWFRQIQMPGSVTVIILCRLLQFPTVGSQAETLQLPFMRLQAIVKEQNRSEITAADGMKWGTYIHGNEVQLRSNNSRFDVWAPRSIITSAVHNVLNEPGRLASNTVIARAQGAVTTTRMSAWLSHQGFVLPTVSPTAFSVLPLQSTNVSFTSIPVEVVTDPNILLGMQTTLHIAELVKVCHPSPDIVSAVAEHAIWLSKVLLQVVQNESQLQGTESYNECLALLGRVQSVIKMGRFGSVVPQLQYRMYGSLINQMAQVAQNYDREFKQFKLFIIQNQILGSYLLQQNKAFADRELQMESFHSAVISHRAQELDTAIAKMDRLSLQMEEENRAMEQAEKEMNEGLRRFQNEQVARAIFSVLRAVAMIGLAFVTGGATAPAAVASAGQAVSIAGQAAQALRRVVEILEGLAAVMEVVAAVKELVASLEQVGQIVDAPEMPDMPSEADWSIFVNEIEAVAEGMPTEVSEVPTWKAKCKNVAALGREMSITAVQISELQYHIWVQGLMRDIARSQADRLAAIQPVDLTNYLEMATQMDMRTTRMLIGLLNMLRIQNAALMYEYLLTPMELTAWPLEMDTMANLLIEQENSALLGLIQLGPSSDFTSRHVVKGIPVSLLLDGEDWEFEIPVQRGMSSFPFSWTRVRIRHLEMHFVQEASSGGEIIHQPATQTGTVYILLQGSTIFHDRRRDEVMTFQAADPLNYQYAYRLDTGEATLTNEPSEQFANTFMQMTPFTRWRLRLSASAKENAGLAFPTATAPDSTTEIVITFHVTAIRQIDWRQEVEE

SEQ ID NO: 756 - protein, 891 aa, Polystichum luctuosum
  source 1..891: note = Polystichium tsus-simense
MTMAAITAPRKYSELYKDLNQISERIRLDQMEFSEVMVIHRMFIKLEELDLGYLEGAERVKRLYVFADVVEVEEGGNFIEVGPLARLPGSIVVVILCRVLKVGVVMNNYLNNAMRVQLPHMKLRLVEVTTQPTGTKLHIHRADAEDYQYPALCIHASVIQSSIRLASTNRPPTYPIPLRFFTFMPDRGSGDVVFSSESRSLIDEPVNIFYVYSHMPEFRRSLPVPEAATLDPASLSDDWYYVHLSRVNSVMSSYVAAEGELEPAFSLLKPKIPFAVLTDPNILLAMQTSLLIAELVELAHPSADTADAVAKHVEWLSKILLQAVSTDEEGMLNPSHDEHLALLFRAQYLMKMMPGRTRSLVVPQLQYDVYSNLINRMAQVAESYDQSLRQFKLFIEQNKILGSYLLQQNKAFADRERDMDVFHSELISQRKIELDNTLLKMDQLSLQMETQREDMDQAKNDMDAGLREFQNRQVAAAMFAVIGAIAAIGLAFVTGGATAPAAMVAAKTAVTAAGAAARALERVIEILDSLQAVMEMVSLIKELVSSLEEIGQLVEAPEMPEMPTEADWFIFENEIEGVAEQMPTEVSEVSAWKTKCKNVAVLGREMITTASYISELQYDIKVQGMLQEIARSHANRLSSIQATDLSNYTEMVTQMDMRTTRMLVALIKVVHMQNAALMYQCLSPPTYVNAWPVTMETVWTMLVQHEHAAVLGLMRLGPSFDFMRTYVVEGIPVQLLLDGEDWEFDIPVEDYTTFPSTWSRVRIHHLEMKFVQAADVHQPITDTGTVYMLLQGSRIFRDRNRADAIHYEAAMSLDYHYAYRLDTGETTLSNLPSQDFTRTFMRMTPFTNWRLRLSASAEENKGLRFPTATSAGSTTQIAVIFYISAIRKISF

SEQ ID NO: 757 - protein, 893 aa, Polystichum luctuosum
  source 1..893: note = Polystichium tsus-simense
MTMAATAPREYSELYKDLNQISERIRLDQMEFSEVMVIHRMFIKLEELDLGHLEGAERVKRLCVFADVVEVEEGGNFIDVGPVARLPGSIMVVILCRVLKVGVVMSDFYVNNAMRLQLPHMKLRLVEVTTQPTGTKLHIHRADAEDYQYPALCIHASVIQSSIRLRSSSNNRPPTFPIPLRFFNFRPDRGSNDVVFSSESRSLIDEPVNIFYVYSHMPAFLHALPIPEAATIDPASLSSDWYYVHLSRVNSVLSSSVAAEGELEPAFSLLKPKIPFAVLTDPNILLAMQTSLLIAELVELAHPSADTADAVAKHVEWLSKILLQAVSTDEEGMLNPSHDEHLALLFRAQYLMKMMPGRTRSLVVPQLQYDVYSNLINRMAQVAESYDQSLRQFKLFIEQNKILGSYLLQQNKAFADRERDMDVFHSELISQRKIELDNTLLKMDQLSLQMETQREDMDQAKNDMDAGLREFQNRQVAAAMFAVIGAIAAIGLAFVTGGATAPAAMVAAKTAVTAAGAAARALERVIEILDSLQAVMEMVSLIKELVSSLEEIGQLVDAPEMPEMPTEADWFIFENEIEGVAEQMPTEVSEVSAWKTKCKNVAVLGREMITTASYISELQYDIKVQAMLQEIARSHANRLSSIQATDLSNYTEMVTQMDMRTTRMLVALIKVVHMQNAALMYQCLSPPTYVNAWPVTMETVWTMLVQHEHAAVLGLMRLGPSFDFMRTYVVEGIPVQLLLDGEDWEFDIPVEDYTTFPSTWSRVRIHHLEMKFVQAADVHQPITDTGTVYMLLQGSRIFRDRNRADAIHYEAAMSLDYHYAYRLDTGETTLSNLPSQDFTRTFMRMTPFTNWRLRLSASAEENKGLRFPTATSAGSTTQIAVIFYISAIRKISF

SEQ ID NO: 758 - protein, 851 aa, Rumohra adiantiformis
MDYSTLYTDLNQISMPLDRVEFSEVMVIHRMYLRLSDLNVGELPGAERVKRLYVFADVVELATFAYPQFLHTRMPGSVTVIILCRLLQFPTDGSFPAWLELPFMELHTLIEQHRSEIKAADDANWGTYVHAEEVQLSPLFNGWPYLVVEAQRCIITAAMHNTFNRTGWVRSVTQFINDQSGRVETTLLARTEFGHIYLPLETDSPTAFSVSHRQITNLPVEYTGIPVEVVTDPNILMGMQTSVHIAELVKACYPSPELVSAVGVHVNWLNEVLLRVVQNESQLQGTEAYNECLALLGRIQCVMKMGPFVSVVPQLQYRMYGSLIRQMAQVAQNYDQDFRQLKLFIAQNQILGSYLLQQNKAFADREVQMESFHSAVISQRRQELDDAIAKMDRLSLQMEEEDRAMEQARKEMEEGLKQFQNEQVARAVFAVLKSVAMIALAFVTAGATAPGAAASAAQAVSIAVQAAQGLQRVVEILEGLEAVMEVVAAIKDLVGALDQVSQIVDAPPMPDMPSEADWSIFVNEIEAVAEGMPTEVSEVPAWKAKCKNVAALGREMCITAEQISQLQYDIWVQGLLREIAQSHADRLAAIQPANLTNYLEMAIQMDMRTTRILIGLLNIMRIQNAALMYEYLLTPTQLTAWPLRMDTVANLLITQESAALSGLAQLGPPSDFTSRHVVKAIPVSLLLDGKDWEFEIPVQGGMSSFPSSWTRVRIRHLEMHFVQEASGGGEIIHQPATQTGTVYILLQGSTVFHDRRREEVMTFQAAVPLNYHYAYRLDTGEATLTNEPSEQFANTFMQMTPFTHWRLRLSASAAENEGLAFPTATAPDSTTEIAITFHVTAIRQIDWRQEE

SEQ ID NO: 759 - protein, 851 aa, Rumohra adiantiformis
MDYSTLYTDLNQISMPLDRVEFSEVMVIHRMYLRLSDLNVGELPGAERVKRLYVFADVVELATFAYPQFLHTRMPGSVTVIILCRLLQFPTDGSFPAWLELPFMELHTLIEQHRSEIKAADDANWGTYVHAEEVQLSPLFNGWPYLVVEAQRCIITAAMHNTFNRTGWVRSVTQFINDQSGRVETTLLARTEFGHIYLPLETDSPTAFSVSHRQITNLPVEYTGIPVEVVTDPNILMGMQTSVHIAELVKACYPSPELVSAVGVHVNWLNEVLLRVVQNESQLQGTEAYNECLALLGRIQCVMKMGPFVSVVPQLQYRMYGSLIRQMAQVAQNYDQDFRQLKLFIAQNQILGSYLLQQNKAFADREVQMESFHSAVISQRRQELDDAIAKMDRLSLQMEEEDRAMEQARKEMEEGLKQFQNEQVARAVFAVLKSVAMIALAFVTAGATAPGAAASAAQAVSIAGQAAQGLQRVVEILEGLEAVMEVVAAIKDLVGALDQVSQIVDAPPMPDMPSEADWSIFVNEIEAVAEGMPTEVSEVPAWKAKCKNVAALGREMCITAEQISQLQYDIWVQGLLREIAQSHADRLAAIQPANLTNYLEMAIQMDMRTTRILIGLLNIMRIQNAALMYEYLLTPTQLTAWPLRMDTVANLLITQESAALSGLAQLGPPSDFTSRHVVKAIPVSLLLDGKDWEFEIPVQGGMSSFPSSWTRVRIRHLEMHFVQEASGGGEIIHQPATQTGTVYILLQGSTVFHDRRREEVMTFQAAVPLNYHYAYRLDTGEATLTNEPSEQFANTFMQMTPFTHWRLRLSASAAENEGLAFPTATAPDSTTEIAITFHVTAIRQIDWRQEE

SEQ ID NO: 760 - protein, 901 aa, Rumohra adiantiformis
MAASAAAIPDYKELYRDLNQISERMRLDQMDFSEVMVIHRMYIRLEELDLGHLEGADKVKRLYVLADVVEVEEGGNFIEQGPVARLPGSILVVILCRVLLVGIVINVHSNGENFNNAMRLQLPHLKLRAVEISSSTDSNFKLEMHRVDQTAGEYNQYPALTVNADLVQCRMRWVIHRPPITSVSLSPIFVAFMPDRGSGDVIFSSESRSMVDRPVQMFSVYSHVPRFIQSRPLPLPEEVTIDLSSWEPKEFYSLFVSTAPTVSLSKSEAVAGDLEPAFSILKRTVPVVVLTDPNILLAMQASLLIAELVQIAHPSPDTADAVAKHVEWLNKLLIQAASDTEGTPAHHEYLALLFRAQYVMKKIGRTRHLVVPQLQYDVYSGLINRMAQVAESYDQSLRQFKLFIQQNKILGSYLLQQNRAFADKERDMDVFYSELISQREVELQSTLLKMDQLSSQMETQREDMEQAQKEMEEGLRRFQNRAVANAMFAVIGAVAAIGLAFLTGGATAPGAMAAAGNAVTAAGQAARALQRVLDILEGLQVVMEVLSIIKELVASLQDLGQLVDAPEMPEMPLESDWYIFENSIEEVAEGMPEEVSEVTAWKTKCKNVAVLGREMITTAVYISQLMYDIKVQGMLQEIAKSHAQRLENIQAADLQGYTEMVTQMDMRTTRMLVELIKVVYMQNAALMYQSLSPPTAVNAWPVTMETVWSILLQHDHAALLGLLRLGPSFDFMRTYTVEDVPVSLLLDGEDWQFEIPVRDYTVFPSTWSRVRIHHLEMKFVKAAHVHQPITDTGSIYVLLQGSRIFRDRNEDETIDYEAALPLDYHYAYRLDTGETTLSNLPSQEFTKTFLRMTPFSNAWRLRLSSSAEENKGLAFPTATAADSTTQIAITFYVTAIRRISF

SEQ ID NO: 761 - protein, 901 aa, Rumohra adiantiformis
MAASAAAIPDYKELYRDLNQISERMRLDQMDFSEVMVIHRMYIRLEELDLGHLEGADKVKRLYVLADVVEVEEGGNFIEQGPVARLPGSILVVILCRVLLVGIVINVHSNGENFNNAMRLQLPHLKLRAVEISSSTDSNFKLEMHRVDQTAGEYNQYPALTVNADLVQCRMRWVIHRPPITSVSLSPRFVAFMPDRGSGDVIFSSESRSMVDRPVQMFSVYSHVPRFIQSRPLPLPEEVTIDLSSWEPKEFYSLFVSTAPTVSLSKSEAVAGDLEPAFSILKRTVPVVVLTDPNILLAMQASLLIAELVQIAHPSPDTADAVAKHVEWLNKLLIQAASDTEGTPAHHEYLALLFRAQYVMKKIGRTRHLVVPQLQYDVYSGLINRMAQVAESYDQSLRQFKLFIQQNKILGSYLLQQNRAFADKERDMDVFYSELISQREVELQSTLLKMDQLSSQMETQREDMEQAQKEMEEGLRRFQNRAVANAMFAVIGAVAAIGLAFLTGGATAPGAMAAAGNAVTAAGQAARALQRVLDILEGLQVVMEVLSIIKELVASLQDLGQLVDAPEMPEMPLESDWYIFENSIEEVAEGMPEEVSEVTAWKTKCKNVAVLGREMITTAVYISQLMYDIKVQGMLQEIAKSHAQRLENIQAADLQGYTEMVTQMDMRTTRMLVELIKVVYMQNAALMYQSLSPPTAVNAWPVTMETVWSILLQHDHAALLGLLRLGPSFDFMRTYTVEDVPVSLLLDGEDWQFEIPVRDYTVFPSTWSRVRIHHLEMKFVKAAHVHQPITDTGSIYVLLQGSRIFRDRNEDETIDYEAALPLDYHYAYRLDTGETTLSNLPSQEFTKTFLRMTPFSNAWRLRLSSSAEENKGLAFPTATAADSTTQIAITFYVTAIRRISF

SEQ ID NO: 762 - protein, 853 aa, Asplenium trichomanes
MDYSTLYRDLNQISMPVDHVEFSEVMVIHRMYVRLSDLDVGELAGAEKVKRLYLFADVVELAPELAPGKRTQMPGSITVIILCRLLQFPTDGSRAATLQLPFMKLHAILRERYRSEITAADGTNWGTYIHGDEVQVSPLYTNNSVLPVWADRSIITSAFHNVLDEPGRVISSTSITMAQAAPNNTRMTAEPGWVFGNRFLLYTVSSTAFSVLPLQSTNISFTSIPVEVVADPNILLGMQTTVHIAELVKACRPSPDIVSAVGQHVIWLNKVLLHVVQNESQLQGTESYNECLALLGRVQSVMKIGRSGSVVPQLQYRMYGSLIKQMAQAAQNYDQEFRQFKLFIIQNQILGSYLLQQNKAFADRELQMESFHSAVISQRMQELDTAIAKMDRLSLQMEEENKAMEQAQREMDEGLRRFRNEQVARAVFSVLRAVAMIALAFVTGGATAPGAAASAGQAVSIAGQAAQALQRVVEILDRLEAVMEVVAAVKDLVDSLEQVGQIVEAPVMPDMPSEADWSIFVNEIEAVAEGMPTEVSEVPAWKAKCKNVAALGREMSITAVQISELQYDIWVHGLMRDMARSQADRLAAIQPADLTNYLEMATQMDMRTTRMLLGLLNMLHIQNAALMYEYLLTPTELTAWPLGMDIVANLLIAQENAALLGLVQLGPPSDFTSKHVVKGIPVSLLLDGEDWEFEIPVEGGMSSFPSSWTRVRIRHLEMHFVQEMSGGSEIIHQPATQTGTVYILLQGSTTFHDRRRDEVMTFQAAAPLNYHYAYRLDTGEATLTNEPSEQFANTFMQMTPFTRWRLRLSASAAENAGLGFPTATAPDSTTEIVITFHVTAIRQIDWRHEEEEE

SEQ ID NO: 763 - protein, 827 aa, Asplenium trichomanes
MDYSTLYRDLNQISMPVDHVEFSEVMVIHRMYVRLSDLDVGELAGAEKVKRLYLFADVVELAPELAPGKRTQMPGSITVIILCRLLQFPTDGSRAATLQLPFMKLHAILRERYRSEITAADGTNWGTYIHGDEVQVSPLYTNNSVLPVWADRSIITSAFHNVLDEPGRVISSTSITMAQAAPNNTRMTAEPGWVFGNRFLLYTVSSTAFSVLPLQSTNISFTSIPVEVVADPNILLGMQTTVHIAELVKVQNESQLQGTESYNECLALLGRVQSVMKIGRSGSVVPQLQYRMYGSLIKQMAQAAQNYDQEFRQFKLFIIQNQILGSYLLQQNKAFADRELQMESFHSAVISQRMQELDTAIAKMDRLSLQMEEENKAMEQAQREMDEGLRRFRNEQVARAVFSVLRAVAMIALAFVTGGATAPGAAASAGQAVSIAGQAAQALQRVVEILDRLEAVMEVVAAVKDLVDSLEQVGQIVEAPVMPDMPSEADWSIFVNEIEAVAEGMPTEVSEVPAWKAKCKNVAALGREMSITAVQISELQYDIWVHGLMRDMARSQADRLAAIQPADLTNYLEMATQMDMRTTRMLLGLLNMLHIQNAALMYEYLLTPTELTAWPLGMDIVANLLIAQENAALLGLVQLGPPSDFTSKHVVKGIPVSLLLDGEDWEFEIPVEGGMSSFPSSWTRVRIRHLEMHFVQEMSGGSEIIHQPATQTGTVYILLQGSTTFHDRRRDEVMTFQAAAPLNYHYAYRLDTGEATLTNEPSEQFANTFMQMTPFTRWRLRLSASAAENAGLGFPTATAPDSTTEIVITFHVTAIRQIDWRHEEEEE

SEQ ID NO: 764 - protein, 903 aa, Asplenium scolopendrium
  source 1..903: note = Phyllitis scolopendium 'Angustifolia'
MGVTVVSDELCLLDLDEGSEEWVKDEEAIKAARSSTPEVNYEALYANANQIARDLRVGSVPCGELLSVNGRMFVRLDSLDVSRLRQPERVQNLIVLADVVEISGRDLVLPGASSVRIICRILHLRSRDVQLDLPYAWRTSSQTQPFQFSLRAQQIVVSPSAAPPSLSSTGALVVRLHRELNQWATTRTRFTQYVVRCFGYTASSVNSTVNINIPVSAETPPSFHWLRVNSENLNLKVNQDAVWRAHVDVQVALPSQLDLNDLHVMMGMESTLLTAEMILSYRSDRPDVVALAVEHVEWIRMSLVQNHEQQPNLPDNQFALLARAEMLAKLSIDGSQSLVVPQLEYTAYSEVIRQIAVVAEAYNQEFTQLHLFVQQTTILGDYVLNTVKALAEKEKDIALLEEAVVRGKQSELDIAVEKIERLEQQILKQIEEVQEAKEDMEKGIIAYRNRLIANAFFEVLSAVLQIAGSFVYFKTGQITDGLAALGGGLASANQAIWLIVDAVDAKNSLSNITDNLVDVEKAMKVVNAVLALVDTVTNLDELLDAPRMPDVDSSHWDIMENEIEIVAAQLPTEVSEVRVWSLKCRNVVIVCREVCTTAAAIMQLQYELFVHARKKEISERHAERLAQIQAVDLGDYLELASQADMRTVRLLIQLLDLLATQNGALQYHYLLPPEPFVGWPTIDNVRRMLVARQQQAVISQTSLGPSYRVRTRLVLDSVPVGLLLSGEDYSFTIAPISEQSIPVFPAVWSRVRIEELQMVFTAGTTGAHMPVAGPGGKVYLLLQPSSTFHDRLRYQAFNYQAAAPRPFQYVYDLATGEPSLVSRPSEPGLFLRMTPFTRWRLRLSASAYQNEGISFPTATAADSVAEITITFELTAIVHPQSFLEEDGITFLMPGKGGDDQVVS

SEQ ID NO: 765 - protein, 903 aa, Asplenium scolopendrium
  source 1..903: note = Phyllitis scolopendium 'Angustifolia'
MGVTVVSDELCLLDLDEGSEEWVKDEEAIKAARSSTPEVNYEALYANANQIARDLRVGSVPCGELLSVNGRMFVRLDSLDVSRLRQPERVQNLIVLADVVEISGRDLVLPGASSVRIICRILHLRSRDVQLDLPYAWRTSSQTQPFQFSLRAQQIVVSPSAAPPSLSSTGALVVRLHRELNQWATTRTRFTQYVVRCFGYTASSVNSTVNINIPVSAETPPSFHWLRVNSENLNLKVNQDAVWRAHVDVQVALPSQLDLNDLHVMMGMESTLLTAEMILSYRSDRPDVVALAVEHVEWIRMSLVQNHEQQPNLPDNQFALLARAEMLAKLSIDGSQSLVVPQLEYTAYSEVIRQIAVVAEAYNQEFTQLHLFVQQTTILGDYVLNTVKALAEKEKDIALLEEAVVRGKQSELDIAVEKIERLEQQILKQIEEVQEAKEDMEKGIIAYRNRLIANAFFEVLSAVLQIAGSFVYFKTGQITDGLAALGGGLASANQAIWLIVDAVDAKNSLSNITDNLVDVEKAMKVVNAVLALVDTVTNLDELLDAPRMPDVDSSHWDIMENEIEIVAAQLPTEVSEVRVWSLKCRNVVIVCREVCTTAAAIMQLQYELFVHARKKEISERHAERLAQIQAVDLGDYLELASQADMRTVRLLIQLLDLLATQNGALQYHYLLPPEPFVGWPTIDNVRRMLVARQQQAVISQTSLGPSYRVRTRLVLDSVPVGLLLSGEDYSFTIAPISEQSIPVFPAVWSRVRIEELQMVFTAGTTGAHMPVAGPGGKVYLLLQPSSTFHDRLRYQVFNYQAAAPRPFQYVYDLATGEPSLVSRPSEPGLFLRMTPFTRWRLRLSASAYQNEGISFPTATAADSVAEITITFELTAIVHPQSFLEEDGITFLMPGKGGDDQVVS

SEQ ID NO: 766 - protein, 876 aa, Asplenium scolopendrium
  source 1..876: note = Phyllitis scolopendium 'Angustifolia'
MEYGSLYGDVNQVSLRFENTEVSEVMVVHRMHVRLEELDMSNDKLKRLYVLADVVELPSQRKTIVIPATVSAIIMCRVLYIPYIWTVFDNCTVLLPHMRFRVVETSLTLRTGQFFALPSSDTVDNGAGSFGGLYIHADRFIYRQATSFTSDWVQPLQLRVRGSSTFSSTFRDPDWPETLPVTNLNQTITLSLGSFLTPSDSDLQRSDEIEFLQTEPQRVQVVFNRPGGTTGVALLVENSPEISFFPAPSLEHVPADVLADPSIILGMQMNMLSAELVRAAHNSQQVIKAVTKHVEWLSKILLQVASPSDDILALLFRVQAFIKMAKQSRFVVPRLQYHVYSNLINRMVQVAQDYDQEFRQLRLFIAQNEILGSYLLQQNKAFADKEKDMSAFHSQVVSMRRSELTSTIEMMGRLSLQMETEGEAMDEARDSMVEAIQEYERKQLARALFAVLGAIASVALAFATGGATAPAAVAAAGAAVTAAGRLAEGLRRVVEILEGLQAIMEVVAAIRDLVESLENMGQLVGAPEMPEMPTNADWLIFVNEVEAVAEQVPEEVSEVPVWKAKCKNVAVLGQEMCTTAAHISELQYQIRVEEMLQEIAQRQADRLMGISAADLSSYTEMATQIDMRTTRMLLQLIKMLYIQNAAIKYEYLYAASERLNSWPVTMQTVWTMLLQQENAAILGLLDLGPSNDFTVTHVVKDIPVKLLVDGYDWHFEIPVEDSAIFPAGWSRVRIRYVELKFGKQGTDSNIVIHQPSTNTGLIYVLLQSSRFLSDRKREEVMDYEASTGLAYAYAYDLSTGATTLTNIPSEAHANTFMQMAPFTAWRLRLSASAMENQGLVFPTATSPDNTTQISITFYVTAIRRIDTRRQRADAEL

SEQ ID NO: 767 - protein, 883 aa, Asplenium scolopendrium
  source 1..883: note = Phyllitis scolopendium 'Angustifolia'
MEYSDLYEDVNQVSLRFQQTEFSEVMVVHRMYFRLLDLDMSTGPSFLMFPGSEKVRRLYIVADIVELPANGINMRLPATVSVVILCRVLYVQDVNSPFLTCGLHFPLMRMRVVETQEGTVRVFPVPDSSSSSGGSTDIGLFIHADRFIYRQDTSTLDPLQPLQLRVIGGSTFSTVRPGWPETLEVFSLILWLTLSKGQPIPATESDLQRSDEVELLPPPSPDRLLVVFTGLAPGNIGSMSVDVEYIGAGFSYFSIPPVDPVPTEVLSDPYIILGLQMNMLIAELVLAAHNSPRVINVVTKHVEWLNKILRPKLDLPNDDILGLLFRVQTFLKMAKQPRSVVPRLQYHMYSSLINRMVQVAQVYDQDFKQLKLFIAQNQILGSYLLEQNKAFASKEKDMSSFHSQVVSLRRTELNNAIDKMDQLSVQMENENQAMDQAKEDMMQAIEEYEKKQLANALFAVLGAIASVALAFATAGATAPAAVAAAGAAVSAAGRLAEGLKKVVEILEGLAAVMEIVAVIRELVESLQNLGSLIDTPDMPDMPSDADWLIFVNEVEAVAEQMPADVVGSVAVWKAKCKNVAVLGQEMCTTAAHIGELTYQIKVEEMLQEIAQKQANRLEGITPADLSSYTEMLSQIDMRTTRQLLQLIRVLNIQNAAIKYEYLYVASRQLDSWPVSMDTVWSMLLQQETSAITGLLDLGPSTDFTRTFVVKNIPVGLLVDGRDWQFVIPVEDSPTFPIGYSRVRIRYVELKFEQDSNDGSVIHQPRTNSGLIYMLLQNSQLFSDRRRREILDYEASMGLAYAFAYNLTTGVPTLTNIPSDEHANTFMRMTPFNNWRLRLSSSAEENRGLAFPTANSLDDITQVSITFYITAIRGIDTRREVDEE

SEQ ID NO: 768 - protein, 880 aa, Asplenium scolopendrium
  source 1..880: note = Phyllitis scolopendium 'Angustifolia'
MEYGSLYGDVNQVSLRFEKTEVSEVMVVHRMHVRLEELDMSSDKLKRLFVLADVVELPSQRKTIVIPATVSVIIMCRILYIPYIWTVLDNCTVLLPHMRFRVVETSIAPRAGQFFALPSSDSVDNGAGSVGGLYIHADRFIYRQGTSFTSDWSHSDWVQPLQLRVQGSSTFSSTFRDPNWPETLPVTNLNQTLSLSLGSFLTPSDSDLQRSDEIEFLATEPQRVQVIFNRPGGSTGVLLFVENSPEISFFPAPSLQHVPADVLADPSIILGMQMNMLSAELVLAAHNSQQVIKAVTKHVEWLSKILLQVASPSDDILALLFRVQAFIKMAKQSRFVVPRLQYHAYINLINRMVQVAQDYDQEFRQLRLFIAQNEILGSYLLQQNKAFADKEKDMSAFHSQVVSMRRSELTSTIEMMGRLSLQMETEGEAMDEAKDSMVEAIQEYERKQLARALFAVLGAIAAVALAFATGGATAPAAVAAAGAAVSAAGRLAEGLRRVVEILQGLQEIMEVVAAIRDLVESLENMGQLVAAPEMPEMPTNADWLIFVNEVEAVAEQVPEEVSEVPVWKAKCKNVAVLGQEMCTTAAHISELQYQIRVEEMLQEIAERQADRLMAISAADLSSYTEMATQIDMRTTRMLLQLIKMLYIQNAAIKYGYLYPASERLNSWPVTMQTVWTMLLQQENAAILGLLDLGPSNDFTVTHVVKDIPVKLLVDGYDWHFEIPVEDSAIFPAGWSRVRIRYVELKFGKQGTDSNIVIHQPSTNTGLIYVLLQSSRFLSDRKREEVMDYEASTGLAYAYAYNLSTGATTLTNIPSEANANTFMQMAPFTAWRLRLSASAMENQGLVFPTATSPDNTTQISITFYVTAIRGIDRRQGADAEL

SEQ ID NO: 769 - protein, 880 aa, Asplenium scolopendrium
  source 1..880: note = Phyllitis scolopendium 'Angustifolia'
MEYGSLYGDVNQVSLRFEKTEVSEVMVVHRMHVRLEELDMSSDKLKRLFVLADVVELPSQRKTIVIPATVSVIIMCRILYIPYIWTVLDNCTVLLPHMRFRVVETSIAPRAGQFFALPSSDSVDNGAGSVGGLYIHADRFIYRQGTSFTSDWSHSDWVQPLQLRVQGSSTFSSTFRDPNWPETLPVTNLNQTLSLSLGSFLTPSDSDLQRSDEIEFLATEPQRVQVIFNRPGGSTGVLLFVENSPEISFFPAPSLQHVPADVLADPSIILGMQMNMLSAELVLAAHNSQQVIKAVTKHVEWLSKILLQVASPSDDILALLFRVQAFIKMAKQSRFVVPRLQYHAYSNLINRMVQVAQDYDQEFRQLRLFIAQNEILGSYLLQQNKAFADKEKDMSAFHSQVVSMRRSELTSTIEMMGRLSLQMETEGEAMDEAKDSMVEAIQEYERKQLARALFAVLGAIAAVALAFATGGATAPAAVAAAGAAVSAAGRLAEGLRRVVEILQGLQEIMEVVAAIRDLVESLENMGQLVAAPEMPEMPTNADWLIFVNEVEAVAEQVPEEVSEVPVWKAKCKNVAVLGQEMCTTAAHISELQYQIRVEEMLQEIAERQADRLMAISAADLSSYTEMATQIDMRTTRMLLQLIKMLYIQNAAIKYGYLYPASERLNSWPVTMQTVWTMLLQQENAAILGLLDLGPSNDFTVTHVVKDIPVKLLVDGYDWHFEIPVEDSAIFPAGWSRVRIRYVELKFGKQGTDSNIVIHQPSTNTGLIYVLLQSSRFLSDRKREEVMDYEASTGLAYAYAYNLSTGATTLTNIPSEANANTFMQMAPFTAWRLRLSASAMENQGLVFPTATSPDNTTQISITFYVTAIRGIDRRQGADAEL

SEQ ID NO: 770 - DNA, 57 bp, synthetic construct
  misc_feature 1..57: note = primer
  source 1..57: mol_type = other DNA
cgaaatctctcatctaagaggctggatcctaggatggattacagcacgctttacagg

SEQ ID NO: 771 - DNA, 58 bp, synthetic construct
  misc_feature 1..58: note = primer
  source 1..58: mol_type = other DNA
taagttggccaatccagaagatggacaagtctagactactcctccacctcctgcctcc

SEQ ID NO: 772 - DNA, 52 bp, synthetic construct
  misc_feature 1..52: note = primer
  source 1..52: mol_type = other DNA
cgaaatctctcatctaagaggctggatcctaggatgacgatggcggcaactg

SEQ ID NO: 773 - DNA, 57 bp, synthetic construct
  misc_feature 1..57: note = primer
  source 1..57: mol_type = other DNA
ggccaatccagaagatggacaagtctagactagaaagaaattttcctgatagctgag

SEQ ID NO: 774 - DNA, 58 bp, synthetic construct
  misc_feature 1..58: note = primer
  source 1..58: mol_type = other DNA
cgaaatctctcatctaagaggctggatcctaggatggattacagcactctttacacgg

SEQ ID NO: 775 - DNA, 56 bp, synthetic construct
  misc_feature 1..56: note = primer
  source 1..56: mol_type = other DNA
taagttggccaatccagaagatggacaagtctagactactcctcttgccgccagtc

SEQ ID NO: 776 - DNA, 52 bp, synthetic construct
  misc_feature 1..52: note = primer
  source 1..52: mol_type = other DNA
cgaaatctctcatctaagaggctggatcctaggatggctgcctccgctgctg

SEQ ID NO: 777 - DNA, 58 bp, synthetic construct
  misc_feature 1..58: note = primer
  source 1..58: mol_type = other DNA
taagttggccaatccagaagatggacaagtctagactagaaagaaatgcgccggatag

SEQ ID NO: 778 - DNA, 57 bp, synthetic construct; identical to SEQ ID NO: 770
  misc_feature 1..57: note = primer
  source 1..57: mol_type = other DNA

SEQ ID NO: 779 - DNA, 58 bp, synthetic construct
  misc_feature 1..58: note = primer
  source 1..58: mol_type = other DNA
taagttggccaatccagaagatggacaagtctagactactcctcctcctcctcgtgcc

SEQ ID NO: 780 - DNA, 55 bp, synthetic construct
  misc_feature 1..55: note = primer
  source 1..55: mol_type = other DNA
cgaaatctctcatctaagaggctggatcctaggatgggtgtcacagtcgttagcg

SEQ ID NO: 781 - DNA, 58 bp, synthetic construct
  misc_feature 1..58: note = primer
  source 1..58: mol_type = other DNA
taagttggccaatccagaagatggacaagtctagattagctgacgacctgatcatcgc

SEQ ID NO: 782 - DNA, 56 bp, synthetic construct
  misc_feature 1..56: note = primer
  source 1..56: mol_type = other DNA
cgaaatctctcatctaagaggctggatcctaggatggagtatggcagcttgtatgg

SEQ ID NO: 783 - DNA, 56 bp, synthetic construct
  misc_feature 1..56: note = primer
  source 1..56: mol_type = other DNA
gttggccaatccagaagatggacaagtctagactataactccgcatcagctcgttg

SEQ ID NO: 784 - DNA, 58 bp, synthetic construct
  misc_feature 1..58: note = primer
  source 1..58: mol_type = other DNA
cgaaatctctcatctaagaggctggatcctaggatggagtactccgacttgtatgagg

SEQ ID NO: 785 - DNA, 56 bp, synthetic construct
  misc_feature 1..56: note = primer
  source 1..56: mol_type = other DNA
taagttggccaatccagaagatggacaagtctagatcactcctcatcgacttcccg

SEQ ID NO: 786 - protein, 932 aa, Adiantum sp.
  source 1..932: note = Adiantum peruvianum
MATFEEYHPEQYMELYKDFNQVRERLSLEMMEFSEVMVIHRMYLKLEELDVGHLEGAEKVKHLYVFADVVEMRSREDELEPVARLPGSVSVAIICRVLWIRRQGSVTRETLIAFPHLKVHLKMTGARSVNVYRTHHAAETDDGFVLCIDAGSIQRTSDESTTSGILFSLFSYHFVRSPTLDGKNITFSSDTDSSISNLPVVHFPFYTQGWRWSVTTAGILSFAPSSVTSTTTVHATGSLQTYDFTHLTFAPGFWIMRGIPESLLKDDKLLLFLQTSLLISELAELAHPSSETRNAVLTHVEWLSKILINGESKTEGTEFHHEMQTSLLISELAELAHPSSETRNAVLTHVEWLSKILINGESKTEGTEFHHEYLALSFRAQYMLKTARSTRSLVVPQLQYDVYGPLINRMAQVAQIYDDAINQLKLFVSQNKILGSYLLEQNKTFAARERDMEVFYAELISQMKIELDSTLLKMDQLGAQMEAQSADMEEAQREMEEGLRRFRNRQVAEAMFSVFRAIGAIALAFLTGGATAPAAMSSARRAVTAAEQAARALARVLDILEGLQAVMEVVAIIKDLVESLQNVGQLVDAPDMPEMPTEADWGIFVNEIEGVAEEMPEEVSEVSAWKTKCKNVAVLGRELMTTAAYISRLQYDIQEHAMLQEIARRHADRLSTIQAADLSSYTEMVTQMDMRTTRIMVSLIKVIYMQNAALMYQCLAPPTQVWQWPSLSMETVWTMLMQNEHVAILGLTRLGPSFDFKRIYVVRDIPVSLLLAGQDWEFEIPVSDHTTFPSTWSRVRIQHLEMKFDAGGGAHQPITDTGKVYILLQGSRAFHDRNQVGRLPLLYEAALPLDYHYAYRLDTGETTLSNLPSTNFLDTYMRMTPFTNWRLRLSASAEENKGLDFPTARQESSIKEEATTQIAITFHVSAIRQISF

SEQ ID NO: 787 - protein, 728 aa, Adiantum sp.
  source 1..728: note = Adiantum peruvianum
TNHRHDKELFLPSMNMSMAAAGDMSFLGVNVSTTTVSSSSDVLEFKLQSGSMTSAMRLKDVDAAATLTCIVQTASPSMPLSVMTTGASPGNVWVLGMTTAVVVPASAVAVITDANILLGMQVTVQVAELVKTTHNSDVVIAASTRHVEWLNQLLVQAHAVAPNEDIVTLLYRTQALLKLQREGLVVPRLQYHMYKSLIDRMVQVAQSYDQDFNRLKLFVEQNKILGSYLLEQNKAFAEKEKEMDAFHAQVIELRTAELNGTIDRMDQLSEQMDKENEAMEQAKADMDAGLVEYQNRQVANALFAVLGAIASIGLAFATGGATAPAAVSAAGAAVTAAGQAAAGLRKVIEILEGLQVVMEVVAAIKELVQSLQEIGKLVDAPEMPELPSNADWEIFVNEVEAVAEQMPTEVTEVAAWKAKCKNVAALGREMSTMAAHIAELQYQIQVQEMLREIAQRQADRLSSIRPADLTNYLEMVSEMDMRTTRMLLELIRVLYIQNAALQYEYLQTPAPLSAWPVTMSTVWNLLVQQETAAITGLLELGPPSDFTREYAVKDIPVSLLQEGQDWEFELPVFSADFPSAWSRVRIHHLAMQFDGSAATHVPTTRTGKVYILLQSSRFFDDRAKRANELISYQAGMGLFYQYAYRLSTGEATVTNIPTDEYANTFMRSTPFTRWRIRLSSSAEENEGLAFPTATTADATTQIKITFSVSAIRRVSTRALTANGVVAKW

SEQ ID NO: 788 - protein, 525 aa, Adiantum hispidulum
VRMCAGSCTHANFIEAGSQERRNYLFPSLIISVCACVCVFQFPPLDGVDARSCIKMEYSSLYGDVNQVSLRFEKTEVSEVMVVHRMHVRLEELDMSSDKLKRLYVLADVVELPSQRSTIVVPATVSAIIICRVLYIPYIFTVLENCSFFLSLMRFRVVETRIEPPRTGQFFALPSADAVDDGVGGFRGLYILADRFIYRQATSFTSDWVQPLGLRVRGSSTFSYRQATSFTSDWVQPLSLRVQGSSTFSSTFRPEWPETLPVTNLNHTVTLSLGSFLTPSDSDLQRSDEIEFLPTEPQRVQVVINRGPGSQTGLVLIPENSPEISETEPQRVQVVVNRGPGSQTGLVLVVENSPEISFFPAPSLEHVPADVLADPSIILGMQMNMLSAELVLAAHNSQQVIKAVTKHVEWLNKILLQVASPSDDILALLFRAQAFIKMAKQSRFVVPRLQYHVYRNLINRMVQVAQDYDQELRQLRLFIAQNEILGSYLLQQNKAFAEKEKDMSDFHLQVVSMRRSLGKLFATAK

SEQ ID NO: 789 - protein, 904 aa, Adiantum hispidulum
MAAAAPAARRRDYKELYQDLNQISERMRLDQMDFSEVMVIHRMYIKLEELDLGHLEGAHKVKRLYVLADVVEVEEGSNLHDQGPLARLPGSILVVILCRVLLVGIFVNVRTGTLLNNVMRLQLPHIKLRAVEVRSSITDSNFTLQMHRAQSTGEIYDQYPALTINADLVQCRMRWVHQQPSITSVSLSPRFFAFMPDRGSQDVIFSSESRSMVDRPVQIFYIYSNVLNVIRSHRLPFPEEVTIDLASWEHKEFYYLHVSTAPSVTLSKPSETIQATELEPAFSLLKRSVPAAVLTDPNILLAMQASLLIAELVEIAHPSPDTADEVAKHVEWLNKLLIQAASEREGTSSHHEYLTLLFRAQYIMKKIGRARHLVVPQLQYDVYSGLINRMAQIAESYDQSLRQLILFIQQNKILGSYLLQQNRAFADKERDMDVFYSELISQREVELQSTLLKMDQLSLQMETQREDMEQAQKDMEAGLRRFQNRAVANAMFAVLGAVAAIGLAFLTGGATAPGAMAAAGNAVTIAGQAARALQRVLDILDGLQVVMEVVSLIKELVSSLQDLGQLVEAPEMPEMPLESDWFIFENSIEEVAEGMPEEVSEVSAWRTKCKNVAVLGREMISTAVYISQLMYDIKVQGMLQEIAKSHAQRLEAIQAADMQSYTEMVTQMDMRTTRMLVELIKVVYMQNAALMYQSLSPPTSVNAWPVTMETVWNILLQHDHAALLGLMRLGPSFDFMRTYIVQDIPVSLLLDGEDWQFEIPVRDFTSFPSTWSRVRIHHLEMKFVKATHVHQPITDTGSIYLLLQGSRIFRDRNEDETIDYEAALPLDYHYAYRLDTEETTLSNLPSQEFTKTFMRMTPFSNWRLRLSSSAEENKGLAFPTATSADSTTQIAITFYVTAIRRISF

SEQ ID NO: 790 - protein, 699 aa, Adiantum pedatum
RRAPCGGFSRSRTATGFSRLPANTGGQRVARVWQPISDYVDLFASVLPLNFARATHFVSSFEPAFWILTRGIPDSLLKDDKFLLAMQTSLLISELAQLAHPSSETRTAVLEHVRWLSAIVVDGASKTKGTELHREYLALSFRAQYMLKTASSTRSSLVVPQLQYDVYSPLINRMAQVTQIYDDALNQFKLFITQNGMHGSYLLEQNKALAARERDMEVFYSELISQMKIELDSTLLKMDQLGAQMEAQTEDMEQAQREMEQGLRRFKNRQVARAMFSVFAAIGAVALTFLTGGAAAPAAMSAARTAVTAAEQAARALQRVLDILEGLQAVMEVVALIKELVESLQDVGKLVEAPDMPEMPTEADWEIFVNEIEGVAAEMPEEVSEVSAWKTKCKNVAVLGREMTTTAAYISRLQYDIKEHAMLQEIAKRHADRLSTIQAADLSSYTEMVMQIDLRTTRIMVSLIKVIYMQNAALMYQYLAPPTHVWQWPSLSMEAVWTMLMQNEHIAILGLIRLGPSFDFKRTYVVRDIPVSLMLAGEDWEFTIPLSDHTTFPSTWSRVRIQHLEMKFVDDDDAASVHQPITNTGKVYILLQGSRAFHDRNQVGRLPLLYEAALPLDYHYAYCLDTGETTLSNLPSTSFLDTFMRMTPFTNWRLRLSVSAEENQGLDFPTARQQGTINEEATTQIAITFHVSAIRHVSF

SEQ ID NO: 791 - protein, 896 aa, Adiantum pedatum
MQLSGGQGQVYQSIMAAAAREYSELYKDLNQISERIRLDQMEFSEVMVIHRMFIRLEELDLGHLEGAERVKRLYVFADVVEVEEGGNFIETGPLARLPGSIMVVILCRVLSVRVLMFDNGNNAMRLQLPHMKLRVVEITTQPTTKLQIHRADAEDYQYPALCIHADVIQASIRLSSSSNRPPMDLRFFNFRPNRGSDNVVFSSESRSLIDEPVEIFYVYSHIPRFIHALPIPEAATVDPASRSNDWYYVSLRRVNSTLSSSVAAEGELEPAFSLLKPKIPVVVLTDPNILLAMQTSLLIAELVEVAHPSAETADAVAKHVEWLNKILLQATKVEGILNSSHDEHLALLFRAQYLMKMRPGRTRNLVVPQLQYDVYSNLVNRMAQVAESYDQSLRQFKLFIDQNKILGSYLLQQNKAFADKERDMDVFHSELISQRKIELDNTILKMDQLSLQMESQREDMDQAKKDMDAGLREFQNRQVANAMFAVIGAIAAIGLAFITGGATAPAAVGAAKTAVTAAGAAARALERVVEILDSLQAVMEIVSIIKELVSSLQEIGQLVEAPDMPPMPTEADWFIFENEIEGVAEQMPTEVSEVSAWKTKCKNVAVLGREMITTATYISELQYDIKVQGMLQEIATSHANRLSSIQATDLSNYTEMVTQMDMRTTRMLVALINVVHMQNAALMYQCLSPPTYVNAWPVTMETVWSMLVQHEHAAVLGLMRLGPSFDFMRTYVVEGIPVQLLLDGEDWEFEISVEDYTTFPSTWSRVRIHHLEMKFVQAADVHQPITDTGKVYMLLQGSRIFRDRNRADAIRYEAAMSLDYHYAYRLDTGETTLSNLPSQDFTRTFMRMTPFTNWRLRLSASAEENKGLGFPTATSAGSTTQIAIIFYISAIRRISL

SEQ ID NO: 792 - protein, 845 aa, Adiantum pedatum
VDYESIYKNAHEIGTVVGTDKIPCSEVMVCHRMYVNLDTFRVEQLVGYANVKQLIVFADVVEISCRWTYKLFLPFHTDFRIVCRLLKMKDDHEAIYLDWQRMDGRWMDSLYLPFHTDLRIVCRLLRMTEDHASIHLDWQLVNNSRCAIYAQELVSSTSNTPRLNLLVSRRTIHTNVPDRIIDIKNIVLYYNSQRDYDFTYFDEKTKVEYSYSVSVHFGSTPSVEVLAEDNILTGLQSTILITEMILNYRADLQDAVTAAFAHVTWVNLCLLQVVGRTDVKGADKLLSLLARVQALLKLPTDGSQSLIVPRLEYSAYEKLIAQMATVVESYNNEFVQLSLFIQQNEIMADYLLEQNKVFAAKEKDIAELESMIVDRKSQEMVKAFEKMNSLDAQLAQQVEEMDRAKEQMDAGIQKYKNDQVAKAFFSVIKCILSVGLAIVTGGAASGAAVAGTVAVVEKVSELANMLTKVTEILEGLEALAEILSAIKNLFEAIEDVNNIVEAPEMPEMPSAADWDIFENEIEAVAEQMPQTVSEVSLWKAKCKNVAAVCREISTTAAYIGQLEYDLFLHRKQQEIAAAQAKRLESIQPADLTNYLEMATQLDMRTTRLLVGMHKILTVQNGALQYHYLLEPKLLTGWPTMDRIRSRLVQNEQNAVLALERLGFSTDFVKTYVLSDVPVHLLLSGEDWNFNILEDDPTFPSNWSRVRIVYLEIKFSGDHLPITSTGEVYFLLQASRVFHDRLEGAYLKYEAGTPLEYQYAYILQTGKTTVTNKPTEEEDGKFLRMTPFTKWRLRLSASADENKGLSFPSAANALDSTTQISITFYLTAIRKISTRHGELGTTSDNE

SEQ ID NO: 793 - protein, 851 aa, Adiantum pedatum
MDVDYAAIYKDVNQVTRTVATSQCSEVMAIQRLYVRLNDLDVKGLRNVEVVKQVVVFADVVEVEGGDVLELPGSTQITIVCRVLHTKHPSGAVIRLSSLAPVKCHGREHRHASGPRTHSVTPMNGQLASDGQIVTILATEVVAPAGASLQVQCPVLVDAKIYDSDGYHPDFFYDLNGTASWSSLPFGGATGTTAATARSFQTTTIAPLSWITWTMNEVDWQPSFRVVLPETLPPRLLVNSSILLAMETNILASELISEFQREAVQTTAAVHQHTIWLDDQFQLAVRSSQRQDQLQSQQIRNLHFRVQSLLKLHRMDSNAPLVVPPLQYEQYDKLINLMTQAAQSYDNDFKNLNLFMQQNEILGNFLLDQNKAFAQKERDMEVHHSQLVGLQDRELELTREKFDSLLITLDQQNREMEKAQADLEAGIKQYRDRQIALAVFGALLAVAQLCFAVFTGGATAGAAVATAVQLSETAKVLQSVVKLLQRIEKVVTTLYAFIDFLSEMQSLEQIVNAPEMPELPTAADWYIFENEIVAVAETMPTEISEVPVWKAKCKNVAAVGREIITTAVYMQKLQYDLAVNRMLQQIAQQQAERLESLQIKDLDNYLEMATELDMRTTRILMGLLKVLSLQTGALSYHYLLEPRPLTGWVRMDAVWNALLKNATDAVVALSTSGASNDFVVRYTIKGIPVNLLLEGMDWIFDIPVDDPAFGESHWSRVRIEYIEMKFDSSSDGHLPTTTGGQIYFRLQAGRFFDDRLGHQILHYEAAVPLVYQYAYRLASGETTVSNRPSLSSSTHYMRMTPFTRWGLRLSASAPENRGLAFPTATTEDATTQITLTFYVTARRRISNFFLH

SEQ ID NO: 794 - protein, 766 aa, Adiantum pedatum
HYGFKANRYCAAGGVVIRLSSLSPVDCSAKLITDTTDIKPDDTVLQIDDFNWEVTPKTAAGRVVTILASHLVAPVGAQLRVHCPVNVEYQTNVIWPPVFTTVAGTVEWRISPYSAGASAAQSFAAATTSTFAGTAGLIWTVLKKWYPSFKIVLPEVIPLELLANSNIVLGVEVTTLVSELIMAYQRQATETVAATLHHVEWLNAQLLSAQSSGQLQALHFRVQSLLKLTVDDDNAPLVVPPLQYEVYDGLINVMTRAAESYDNAFVQLNLFMQQNEILGSFLLDQNKAFAAKERDMETHHSQLVSLQDAELTKTNESIKSMNNELAQQNQAMDKAKADMEAGIKQYKDRLIAEAVFGVFTAIAQVCLAIFTGGATAAAAVETAGKLSETAKALESAVKHLEKLQKIVQVINSITDFLSNLQSLNQLIEVPKMPDLPTEADWDMFENEIVAVAEGMPTEISEVPMWKAKCKNVAALGREIIRTVAYMQQLQYDLAVNRMLQNIAQQQAERLEGLHIQDLDNYTEMATELDTRTNRLLMGLLKVLSLQTGALSYHFLLPPRSLQGWVNMDTVWNTLVKNEYDAVRGLGSLGSAPTDTIQTYVVRDIPVGLLLEGNDWFFDIPVDDPAIPPPWFRVRIEHVELKFPTTNPIVHRPTTRNGEVYILLQAARFFSDRLIDEVLHFQATKTVSYQYAYRLDSGETTLHNRPTASSSTHYMRMTPFTRWRLRLSASAPQNEGLAFPTATTEDATTQITINFHLTALHRIQFRA

SEQ ID NO: 795 - protein, 881 aa, Adiantum pedatum
MAQGKELLTVDGVVDYEALYGEVNEIARAVRTHKVSCSEVMVINRMFVRLDTFSVEHLQQPGVVKSFIVVADVVEIEGSSSSLTLPGSSLILIVCRRLQLKNKNVILDLTWNLAATNVKSSQLPRCSIYTQHVDVPNAGSTLRIQVKRELKWSNGSSFTHYFGREFSYSNSTKTFSTTSSAPANYSVSSVGQPPASKLILVNSRKMNILTNDIRWKGFIDLQVNALPPLNDLAHPNVIEAFESNLLIVEMILNYQTNMQDLVTAAKDHVQWINQSFLEVVDWSNPEVGLQLKALLGRAQLLLKMPSDGSQSLIVPQLEYDGYDRVIQEMAKVAESYNREFRELSGLILNNEIIGQNILKQSKILGAKETEVQNLESLIVLRKEKELDRAIERLELLQNQLIRQVNEMETAKEKLDQGLKEYKHKQIARAFFQVLGAMMQIMGSCRLSSIPDFAVAFGGGISAAISAAEKVEDASVRNTLQNVANKLRNVEIVMEVVNSVKDLYTNASNLEDILNSPQIPDVPSSDWEIMRNDMEEVAAGMPTEVSEVSTWQAKSKNVVAVCEEICATAISISQTQCDLFVHVKQQEIAQRQAERLNQMQAVDLGDYLEMATQLDMRTMRVLICLLKMLGIQNGALQYQYLLAPKPFIGWPTIDTVRMEILRRVELAVLAKVELGSPVMLTRNYVIESIPVGLLISGDDWNFSFDASDNSVFPSTWSQVRIQYLEMKFTGEHCPITETGEVYLLLQASSKFEDRWKKQVFQYEAAAPLTYQYAYNLQSGKTTIPNKPHVEGTFLRMTPFTRWRLRLPASALENRGISFPTTTSLDNFISISITFHLTAIAQIQSKSLGIVYNLFDDDDDDDDEQGEGGEQGGGKSRGEEEVL

SEQ ID NO: 796 - protein, 890 aa, Adiantum pedatum
MAGAEDESMSTMYEGISTGSTAASDDELQDDMSFMYNYIQKSVDADRDSDYEAIYNGVNQIARAVGIRNRVESGEVLAIHQMFVRLDTLSVGNLLRAERVKYLIVFADVVEIEGADLTLPGSDLVLIACRLLRVKNQNVVLNLSWNIASSSTPPRCSICAQRVIITSSTAVANCTLRIQVMHALQWSDKSPFTQYFGRKFAYSSQNSSITAAPPNESSSSLGKPPSSRLILVNSKTMNILINNIRWKGYIDFQVGLPSSDDLIDPRVIEGIESTLLIAEMILTYQTNARDAVEAAKKHVQWINMALLQVVDSQNSEAGLRQKTLLARIQMLLKLSMDGTPGLVVSVLEYGIYDRVIQDLIRVAELYNNEFNQLNLFIQQNQILGDYVLEQSKVLAEREKDVEALESSIVARKQDELKESINTVESLEEQLQRLASEMEDAKDKMDKGLQAYRDKQIAYAFFTVLGAALQLGGSLKLSSSVEMVIGIGATVSEAVNATKEVTNAVASNNLMEVANKLVDVEKVIKVVNAIKELHDNETKLDDILTAPMMPVISSSDWDIMEDNIEEVAATMPTEVSEVVTWKTKSKNVIAVCREICTTAISVSETQYELFVHGKQQEIARRHTERLMKMKAADLGDYIEIAKQVDMQTMRLLIILLGNLAIQQGALHYHFLLAPEPLMSWPTIDTVRRHLIQQAEKAVWAEERMGEPVKLTQIYVLEDIPVSLLLAGNDWIFTIEPSETTVFPSNWYRVRIRYIEMKFTGENLPQSPETGRVYLLLQASSTFQDRSRGREVFQYEAATPRNYHFAYEVQSGVTTVHNEAAEGGRRFLMTPFTRWRLRLSASAIENQGVSFPVATSATISITFHLTCIVRVQSYRSQEDDEDEDEDEDEDGL

SEQ ID NO: 797 - protein, 883 aa, Adiantum pedatum
MVNERFLVDLDERSEEFVKDAQTRSTVSTEVDYEHLYANANQLARDLRTRNVRCGEVLAVHRMFVRLDSLDVQQLQQAERVKRLIVFADVVEIQGSSVALPGSSLVLIVCRVLHLKSRDVQLDLPFAWDTTAHDSPRCSIRAQQVVVSPSAAPPHLSSDGSLIIRVTHNMGWSNGSSFSQYIVRCFGYSESNSNSSVHINLPVATTRPPSFHWMRVDSEKVSIRINQNIDWTAHINFQVALPSADDLDNLHVVMGIESTLLIAEMILSYRSDRQDVVAAALEHTQWISMSLAQKEVVEGQPKSDLHELKLALLARAQMLQKLPLDGSQSLVVPQLEYGAYSEVIREMTDVAEAYNREFIQLHLFIQQNEILGDYILTAVRNLAEKEKDVASLEDAVVRGKEREIEIAMEKITTLEGQLLKQIEEMTDARDAMEQGVIVYRNKRIASATFEVLGAVLQIAGSIALFATGQIASGLGALGGGISAAVAAAEAVEDAASIKDSLLNVTDQLVEVEVAMEVVNAIQKLVASATDLEDLLAAPPMPIIYSSAWDIMENEVESVAAQMPTAVSEVPVWKAKCKNVVAVSREVCTTAIAISHLQYELFVHARKQEIALRQAERLAEMQAVDLGECLELASQADMRTTRMLINLLDMLATQNGALQYHYLLPPAPFVGWPAIDSVRTLLVQRRQQAIIAQTTMGPSYKVNTRVTLDSIPVGLLLSGEDFSFTIQAISEDTIATFPDVWSRVRIEDLSIVFTGGHQPSSSTTGEVYLLLQPSSSFHDRLRHQVLNYEAAAPRPFQYAYNLSTGHPTLTSRPHEEGLYLRMTPFTRWRLRLSSSAYQNRGISFPTATAPDSSTEITITFDLTAIVHPQTSVEYDNNPEIVDQP

SEQ ID NO: 798 - protein, 877 aa, Adiantum raddianum
MDVDYAADAMDVDYAEIYKEVNQVTRPVPTRVCSEVMSIQRMYFQLDDLDAKLLRNTEVVKRLYVFADVVEMVGQSVELAASVEVVILCRIFKTTRSDAVLRFLSLTSRLECDATPVYASANVVSHFFVRPRPGAADPRLLITIHATQLVAPARTQLRVQRPNVVLHRAQFWALEEIFMPGGVSTGATQPVLRPAVTQDGAMEWRISPYVAGGALAARSFHFTHPHVYRTSQDYLGFTGIFIPEPIPYDLLTNSNIWLGMECTTLICELIDKYQRQATQTVEAAHHHVAWLDKQLLSMGNRITSSNIPKKNVQQIETLHFRVQSLLKIYRRTANGVDAPLIVPSLQYDVYDRIINLMTRAAESYDNDFKQLNLFIQQNEILGSFLLDQNRAFAQKERDMENHHLQLVTLQGHELQATGDKLQALNRQLAEQSEAMDQAKADMDAGIKEYRDAMIANAIFSVFKAIAALCLAAATGGAAAGAAAGAAVDTAAQLSELARVLQSVVKLLKRIENVVKTINAITAFLTELESLNQLIELPEMPEMPTDADWSIFENEIEAVAEGMPTEISEVPAWKAKCKNVAAVGREIITTVAHVEKLQYEISVSKMLQDIAQQQAERLEGLRIEDLDNYLEMATELDMRTNRILMGLLDMLSLQTGALSYHYLLRPRPFTGWVRMETVWRTLLQNESDKLVAIAALGAPQEFSRSYVVENIPVSLLKEGADWIFDIPVHDPVFPSLWSSVRIDYVEMKFPPDTTHLPTTKGGKVYFLLQAARFFHDRLQEDEVLHYQAAVPLVYQYAYHVESGETTLSNRPPQASSALYMRMTPFTRWRLRLSASAPENEGLEFPTATTEDATTEIAITFFVTARRRISTRVDSSSTT

SEQ ID NO: 799 - protein, 874 aa, Adiantum raddianum
MAAVQDFSDVEDFSELYKNAEHVQMGSVPDYYEIYKNVNQVTRAVASSQCSEVMSIHRMCFKLDMLDVKLLTKADTVKRLIVFADVVEIEGDMVELPASTEVTIVCRILSVKKENRQVEENVQVFFNLLESVVTAGDRNDRPAGISLSTSPEFRFCIYAQQVVSNSVVHLRVTQPVTYSDPGFTPPDADTAWMWLSMRIRNLPSRQHMLNANGPRKANGMPVWQTSRNVIERGPEWSRISVLAPVSVPLHTLADPTVILGMQSTLLIAELILSYQTDLPDTVSAAVQHVEWLNTKLLRVVDDNTLDMETTQELLALLARGESLLKMPVDGSHTLIVPRLEYGQYRGLISSMATVAEAYNREFMQVDLFIQQNEILGSYLLQQNKALAERERDMEAFNGLVVARKQEELRAAEERMKELEALLTQQTEAMDQAQEDMEAGLKRYRDEQVARAFFSVLKGVFAIGVAIATGGAAAGPAVKGAVGAVNAVSGLARTLSTVTKIMEMMVQVIEVLNAMKDLIAAISELNQMVEAPQMPTMPSTVEWDIFENEMEEVAESMPEEVTEARTWKTKCKNVAAVCREISTTAAYIGQLHYDLFVHYNQEAIARRQAERLEAIQPANLTNYLEMATQMDMRTSRMLMGLLKVLMLQNGALQFHYLLQPKPFTGWVTMGMVRDALVQHEADALLARERLGPSTDFTQTYVVSDIPLSLLLEGEDWTFHIPPDDSTFPLSWSRVRIRYLEMNFTGGEEFHRPTTNTGRVYMLLQASRFFQDRLLGEVLHYEAAVPLRYQYAYDLKSGETTTSNRPSDQHDGEFMQMTPFNQWRLRLSASADENRGLAFPTAPPDQLDGSNTQISITFYLTAVRRAATRTSEISSQ

SEQ ID NO: 800 - protein, 882 aa, Adiantum trapeziforme
MATFEEYHPEQYMELYKDFNQVRERLSLEMMEFSEVMVIHRMYLKLEELDVGHLEGAEKVKHLYVFADVVEMRSREDELEPVARLPGSVSVAIICRVLWIRRQGSVTRETLIAFPHLKVHLKMTGARSVNVYRTDHAAETDDGFVFCIDAGSIQRTSDESTTSGILFSLFSYHFVRSPTLDGKNITFSSDTDSSISNLPVVHFPFYTQGWRWSVTTAGILSFAPSSVTSTTTVHATGSLQTYDFTHLTFAPGFWIMRGIPESLLKDDKLLLFMQTSLLISELAELAHPSSETRNAVLTHVEWLSKILINGESKTEGTEFHHEYLALSFRAQYMLKTARSTRSLVVPQLQYDVYGPLINRMAQVAQIYDDAINQLKLFVSQNKILGSYLLEQNKTFAARERDMEVFYAELISQMKIELDSTLLKMDQLGAQMEAQSADMEEAQREMEEGLRRFRNRQVAEAMFSVFRAIGAIALAFLTGGATAPAAMSSARRAVTAAEQAARALERVLDILEGLQAVMEVVAIIKDLVESLQNVGQLVDAPDMPEMPTEADWGIFVNEIEGVAEEMPEEVSEVSAWKTKCKNVAVLGRELMTTAAYISRLQYDIQEHAMLQEIARRHADRLSTIQAADLSSYTEMVMQMDMRTTRIMVSLIKVIYMQNAALMYQCLAPPTQVWQWPSLSMETVWTMLMQNEHVAILGLTRLGPSFDFKRIYVVRDIPVSLLLAGQDWEFEIPVSDHTTFPSTWSRVRIQHLEMKFDAGGGAHQPITDTGKVYILLQGSRAFHDRNQVGRLPLLYEAALPLDYHYAYRLDTGETTLSNLPSTNFLDTYMRMTPFTNWRLRLSASAEENKGLDFPTARQESSIKEEATTQIAITFHVSAIRQISF

SEQ ID NO: 801 - protein, 893 aa, Adiantum trapeziforme
MAAPAATEHGGLDYRELYKDLNQISDSLMLDQMEFSEVMVIHRMYIKLEELDLGHLEGADKVKRLYVFADVVDVEDGGNFIDVGPLARLPGSMTVVILCRVLYVRVLPLAVGGNNNAMRMQLPHMKFRVVEIATGRVQLQRVEQSGDELALCIHARIIQCYIRPSASATIRPPYSLRFLHFAPGRGVPGIVFSSEPRSMVDAQVELFQVYSHLGHVFQAPGPDQIVSINPASLATDWYYVSVSFPDRVVLSSSNAARGELEPAFSLLKPDIPVVVLTDPNVSLLIQTSLLIAELVELAHPSADTTAAVAEHLQWLNSLLLQATAEVKEGTASHDEYLGLLFRAQYLVKMMGRARSLVVPQLQYDVYSNLINRMAQVAESYDQALRQFRLFILQNKILGSYLLAQNRAFAEREKDMEVFHSELLSQRKLELETAIQKMDHLSIQMETQSADMEQAKKDMDEGLRRFQNAAVANAMFAVFGAIAAISLAFLTGGATAPGAVAAAKGAVTAAGALARALERVVEILEGLQAVMELVYLIKELMNSLKEVGQLVEAPEMPELPSEADWGIFVNEIEGVAEQMPTEVSEVSAWKTKCKNVAVLGREMITTATYISQLQYDIKVQDMLQGIARNQADRLLSIQAADLSNYTAMVTEMDMRTTRMLVALIKVVHMQNAALMYECLSLPMHVNAWPVTMETVWSMLVQHEHAAILGLMRLGPSFDFMSTYVAKDIPVSLLLDGEDWELDIPVDDYNTFPSTWSRVRIHHLEMKFVQGNEGSAGNIIHQPITDTGSVYLLLQGSRLFRDRNQSDVLNYEAAMSLDYHYAYRLDTGETTLSNLPSQDFTRTFMRMTPFTTWRLRLSASAQENQGLAFPTATSADSTTQIVITFYISAIRRISL

SEQ ID NO: 802 - protein, 833 aa, Asplenium sp.
  source 1..833: note = Asplenium australasicum
MRCPLNADITNSSRDGRRRLQCAKMAAGDYSVLYQDVNQISIRLEKMDFSEVMAVHRMFVRMDDLDVSSGTGLLSGAEKVKRLYVFADVVELPSKQLRLPGTDLIVILCRIFVTNGRHSTELFLPSMNMSMVAPGTGSIRGVILSPTTVLTTSSDALQFKLQSGSMTSVMRLKDVSVAATLTCNVQAASASMPLTVKTTGTSPGNICVLGMSTAVVVPESAVAVITDANILLGMQVTVLIAELVKIAHNSDVLIAAVTRHVEWLNHLLVQAHAAAPSEDVVALLYRTQGFIKLRNEGLIVPRLQYRMYKDLIDRMVQVAQSYDQDFKQLKLFVEQNKILGSYLLEQNKAFAEKEKDMDAFHSQVIDLRTSELESTIERMDDLSKQMEEQNAAMEQAKADMDAGLIAYQNKQVANAVFAVLGAIASIGLAFATGGATAPGAVASAGAAVTAAGKAAEGLKKVVEILEGLQAVMEVVAVIKELVQSLQEIGQLVDAPEMPDLPSDAEWEIFVNEVEAVAEQMPTEVTEVPAWKAKCKNVAALGREMSTMAAHIAELQFEIQVQEMLREIAKKQADRLSSIKPADLTNYLEMVSEMDMRTTRMLLELIRVLYIQNAALQYEYLQTPAPLNAWPVTMQTVWGLLVQQETAAINGLLQMGAPSDYTQEYAVRDVPVRLLLGGGDWEFELPVRNADFPLTWCRVRIRYVDMRFDAAAEHLPVTSTGEVYMLLQSSRFFEDRAKRENEFISYEGGMGLQYQYAYRLATGDATVTNVPSEEYANTFMRLAPFTRWRLRLSASAPENKGLAFPTATLADATTRIKITFHVSAIRRISTRVAV

SEQ ID NO: 803 - protein, 850 aa, Asplenium sp.
  source 1..850: note = Asplenium australasicum
MASFPDYREIYKNVNQVTRAVASRQGSEVMSIHRMYFKLDELEVERLTEADTVKELVVFADVVGIEGQQVKLPASRTVTIVCHILHVKQEAVKLRFDSFGPVDCDRGWLPGIGEAALILSNSPQVRLSIYAQQVVCNTTRAVVQVAHPVTVSQTVSPHNPSRYAIPGTMKWQVEIASDQPDLSAAERSYELRTERFWDVMEKVWRIDQQEWSLFTHLLQGPVSIPPAILGDSNIILGMQSTLLIAELVLSYQTRADDTVSAANAHLQWLITNLLQVLDDNSLDKETREQLLALQARAELASKLPLDGSHTLIVPRLEYGQYQGLIKSMAAVAEAYNSEFMAVNLFIQQNEILGSYLLQQNKAFAARERDMDTFHGLALARKQQELRTAQESMEDLNAQLTQQTEAMDQAKRDMDAGLKKYRDEQVAKAFFSVLKGVLAIGAAIFTGGAAAGPAVNAGVDAVKGVSSLAGKLDMVIDIMERMEKVMEVLNAVNDLVTALSEINKMVEAPEMPSVPSTYEWDIFENEMEEVAESMPTEVTEARTWKTKCKNVAAVCRAICNTASYIGQLQYDVFVQSNQALIAGKQAERLEAIQPADLTNFLEMATQMDMRTSRMLLNLLKVMTIQNAALLFHFLLPPVPFTGWVTVDMVRNALVKHEADALAARERLGPSTDFVQTYVMSDIPISLLLDGDDWIFTIDPADGSTFPLSWSRVRIQYLEMKFTGGEEFHKPTTSSGRVYILLQASRNFQDRLHGDVLHFEAAVPLRYQYAYDLQSGETTVSNRPSQQHDGEYMQMTPFGQWRLRLSASAVENQGLAFPTAVATDLDSSTTQISITFHLTAVRRIDTRALVEL

SEQ ID NO: 804 - protein, 850 aa, Asplenium nidus; identical to SEQ ID NO: 803

SEQ ID NO: 805 - protein, 886 aa, Athyrium filix-femina
MEYSALYGDVNQVSLRFEKTEFSEVVVVHRMHVRLAELNVTLGDNNILLQGSDRVKRLYVLADVVELPPIFSTSMSLPGTVSVVILCRILYLPYLEDASSASGWAVHAALLRLRVVETHAGFAQVFTIPANDSSAAAPADIGLYIHADRIIYRDDPGRSIPVIEVRVGGDSRFSPFLPGSPEIRLSSVQYVREFSKGQPVAPEDSELQRSDEIELIAPSGSEQQLRAAFGASVGMNLLFHFSSSFDILSLDPVPAALLTDPNIITGMQMNMLIAELVLTAAHNSPQLIKVVTRHVEWLNKMFLQLASPNDDILALLFRVQAYQKMAKQPHPVVPRMRYSRYEGLINQMVQIAQSYDQDLKQLKLFVAQNEILGSYLLEQNKAFAAKEKSMSEFHLQVSDLRRSELNDAIQKMTGLGEEMEVEKEAMDQAYKDMEQGLQEYEKRQIVTAVFAVISAISLCALGFVTGGATVAAVPGAVANAAQAVSAAVSLANKLQKVMGILEIINQVVQTAVAIKEVIELFDNMGQLLEAPEMPEMPSNYDWLIFVNEVEAMAEQLPVEVNERIVWKAKCKNVAVLGQEMCTTGSHIADLQYQIKVEEMLREIAQSQAERLEGISSADLSSYTEMVSQIDMRTTRLLFQLIKVLHIQNAALKYEYLYAADEHLVSWPVSMETVWTMLLQQQRLSLLGWENLVGTNNLPNDDTRTYVVKDIPVEVLLSGRDWPFVIHEEDYTAFPSGWYYVRINHVELKFEQQTAGSTDIVIHQPSTNTGRLYMLLQSSRFFHDRNQGVKMEYEGSRGLSYPYAYNLNTGETTHNNIPSDQFKNIFMQMTPFTTWRLRLSASAEENEGLVFHPPPTSPTSTTQVSITFHVTRIRRIDRSTVHQKHVS

SEQ ID NO: 806 - protein, 849 aa, Athyrium filix-femina
PTCQSPEERRGGEATVRIRGRGGNGGPERAASGVEPSHHIVPSPQDKAKWCSDPTVVLEPGGLLGEAPKQRYNGYRARGHCAADRQVLESDAKEWRACSKRPSNTGNTDIEMEDTVLQIDKYWEVTPKSGELAANGRVVTILASHLVAPVGAQLRVQCPVNVEYQTNVIWPPVFSTIAGTVEWRILPYSAVAAAVHSSAAATTSTFAGTAGLIWTVDEVKKWYPSFKIVLPEVIPLQLLANSNIVLGIEVTTLVSELIMTYQRQATETVAATLHHVEWLDAQLLSASQAQSSGQIQALHFRVQSLLKLPMDDDNAPLVVPPLQYEVYDNLINLMTRAAESYDNAFTQLNLFMQQNEILGNFLLEQNKAFSAKERDMESHHSQLVSLQDAELTATSENIKSMNNELAQQNQAMDKAKADMEAGIKQYRDRLIAEAVFGVLTAIAQVCLAVFTGGASAAGAVETARKLSETAKVLQSVVKHLERLQKIAQVINAVTDFLLNLQSLNQLIELPKMPDLPSEADWDMFENEIVAVAESMPTEISEVPMWKAKCKNVAAVGREIIRTVAYMQQLQYDLAVNKMLQDIAQQQAARLEGLHIQDLDNYMEMATELDMRTNRLLMGLLKVLSLQTGALSYHFLLPPRQLNGWLNMDTVWNALLNNEYDAVKALGSLGSAPTDTMKTYVVRDIPVGLLLEGNDWFFDIPVDDPAFPPPWFRIPIEHVELKFPTDSSQCVHLPTTHSGQVYILLQAARFFSDRLKDEVLHFQATKPVSYQYAYRLDSGETTLSNRPTLSSSTHYMRMTPFTRWRLRLSASASQNQGLAFPTAATEDATTQITINFHLTAIHQIQYRAAQ

SEQ ID NO: 807 - protein, 513 aa, Athyrium filix-femina
TGKHHTENGTIEFTNGDTKRRHGPSQRGHGCRYKSFTARLLNLDDHLASLLHTYGRGIHVPSSGLVYTHFNLQLISCRTMICIKHAGLRRFQNRRVAEAMFAVLGATAAIGLAFVTGGATAPAAVTAAGNAVNAAGQAANALRKVVEILEGLQEVMAMVALIKELVDSLQDIGQLVEAPEMPVLPSEADWLIFENNVEEVAEGMPTEVSEVSAWKTRCKNVAVLGRAMVSTAAYISQLQYDIKVEAMRQEIAKRHAERLLAIQPADLSSYTALLTHMDMRNTRMLLALIRVLHIQNAALMYHSLSLPTHMNAWPVTMDTVWRMLVQHEHAAILGLLRLGPSFDFMRTYVVKDIPVSLLRDGEDCEFNISVQDDTAFPSTWSRVRIHHLEMKFVQEAHVHQPSTHTGKVYILLQGSRIFHDRNEDDVLHYEAAMPLDLHYAYRLDTGETTLSNLPSNDFIRTFIRTTPFTTWRLRLSASAEENKGLDFPTALTVDATTQIAITFYVSAIRRISL

SEQ ID NO: 808 - protein, 882 aa, Athyrium filix-femina
LLDPVLSATEVVDYEALYSEVNEIARALWTLKVRCSEVMAINRMFVRLDTLSVEHLQQPEIVKSLIVVADVVEIEGSSSLTLPGSSLILITCRLLRVKQKNAVLNLAWNLAATNANTSTTSLPRCSIYTQQVDVSNGSTLRIQVKRELKWSNGSPFTQYFGREFSYSSSTKNYSTTSAPAAADYSVKSVGQPPESNLILVNSKKMNILMNDIAWKGFIDLQVAMPSLNDLAHPNVIEGIESNLLIVEMILTYQTNVKDLVTAAKDHVEWINKGILEVVDWPNSEVGLQLKALLGRAQMLLKMPSDGSESLIVPQLEYSGYEKVIQEMAKLAESYNTEFRELNALILNSEVIGQNILNQTKILGAKEREVQNLESLIVLRKQKELDQAIERLEILENQLIRQVDEMEAAKKKLDQGLQAYKNEQIAMAFFSVLGTMMQIAGSARLSSIPEIVVGIGGGISEALSAAEKVKDAIVSNTLQDVANKLRNVERVMEVVNSVKDLYTNATNLEDILNAPQIPDVPSSDWEIMRNDMEEVAAGMPTEVSEVSTWQAKSKNVVAVCEEICVTATSISNTQCDLFVHVEQQEIAKRQAERLNQMQAVDLGDYLEMATQLDMCTMRVLICLLKMLGIQNGALQYQYLLAPQPFIGWPTIENVRMEMLRRVELAVLAKVQLGPPVTLTRNYVIESIPVGLLMSGDDWNFSIDASDNSIFPSTWSQVRIRYLEMKFTGEHHPITETGEVYLLLQASSKFEDRLKTQMFQYEAAAPLTYQYAYNLQTGETTLPNLPHEEGTFLRMTPFTRWRLRLSASAYQNQGLSFPTTTSLDNSISISITFHLTAIVQIQTRLAGGSVYNLFDDDDGDDDQQEGGEQAGGKSGGEEEAGSPI

SEQ ID NO: 809 - protein, 821 aa, Athyrium filix-femina
MAAAVDYESIYKNANEIARVVGTDKISCSEVMACHRMFVRLDTLSVEQLVGSSNVKQLIVFADVVEIQDSSFTLPGSTQIFIACRILDVKANKDIDLTLDWQVVNNAGQTSIPRCAIYAQNIVSSSSTKSGTILLKVKYQRSSSSAPVYFGREFSYSAASTAVVDFSTAQDNLELINRKNWVVNINGMEWSAYVDLQFGLPSVEELAEYNILTGLQSTILISEMILNYRTDLPDTVTAAIAHVQWANLCLLPVVGMTNLEGAYQLPSLLGRAQSLLKLPTDGSQSLIVPRLEYSGYEKLIAQMVTVVESYNNEFVQLILFIQQNQIMGAYLLEQNKAFAAKEKDIAELESMILDRKKQEMDNAFQKMEALNKQLEQQVEDMNQAKEDMDVGIQKYKDEQVAKAFFAVIKGILGVALAIATGGATSAGAVAGAVDAVEKVSQLAKALQKVMDILQGLEELAAILSAIKELLESIEDLNKMVEAPEMPEMPTMADWDIFENEIEAVAEQMPEEVAEVPVWKAKCKNVAAVCREISTTAAYIGQLEYDLFLHGKQQEIAEAQAKRLESITPANLTNYLEMATQLDMRTTRLLVGLLKMLTVQNGALQYHYLLPPKPFTGWPTMDRIRSTLVQNEHNAVLALEQLGFSTDFTRTYVLSDVSVYLLLSGEYWIFNIPVDDPTFPSNWSRVRIVYLEINFTGDEGSTHFPSTNTGEVYFLLQASRMFQDRLEGEYLQYEAATPLQYQYAYVLQTGETTVPNKPSQEEDGRFLRMTPFTSWRLRLSASADENKGLSFPSANALDSTTQISITFYLTAIRKINTREGIE

SEQ ID NO: 810 - protein, 882 aa, Blechnum sp.
  source 1..882: note = Blechnum cartilagineum
MEYSTLYGDVNQVSLRFQKTEFSEVMVVHRMYVRLAELDMTTEPYFEMIAGSEKVKRLYLLADVVELPSSALNMRLPATISVIILCRILYIPDINSPYLACGLHFPLMRLRVVETSEGVGRAFPLPSNDGSGAAASIGLYIHAHRFIYRQDTTTGDSIQPLQLRAIGGSTFSTQVRPDWPETLEVSSLICWLSLTKGPRLTPADSDLQRSDEIELLAPASPDKVNIVFAGLAPGNLLSLYLLVDNTSAFSFFPTPVPNVPADVLTDPSIILGMQMNMLIAELVLAAHNSQQVINVVTKHVEWLNKILLQVASPSDDILALLFRVQAFMKMAKQPRSVVPRLQYHMYSSLINRMVQVAQYYDQEFKQLKLFIAQNEILGSYLLEQNKAFAAKEKDMSVFHSQVVSMRRSELNSAVEMMDKLSLQMEKENEAMNEAKDAMVEAIEEYERKQLANALFAVLGAIASVALAFATGGATAPGAVAAAGAAVTAAGKLAAGLQKVVEILEGLQAVMEIVAAIKDLVESLQNMGQLIDAPEMPELPTNADWQIFVNEVEAVAEQIPTEVAEVPVWKAKCKNVAVLGQEMCTTAAHIGELQYQVMVEEMLQEIAQRQADRLEGISPTDLSSYTEMASQIDMRTTRVLLSLIRVLYIQNAAIKYEHLFAASGQLDSWPVSMETVWTMLLQQENAALLGLLDLGPSNDFTVTYVVKDIPVQLLIDGADWNFEIPVGDFTAFPAGWSRVRIRYVELKFVQQGSGEGNIVIHQPSTNTGLVYILLQSSRFFHDRKREEVMDYEASMGLAYAYAYDLVTGATTLSNIPSEEYANTYMRMTPFNNWRLRLSASAMENQGLVFPTATSPDSTTQIAITFYVTAIRRIDTRIDTQRQE

SEQ ID NO: 811 - protein, 865 aa, Blechnum sp.
  source 1..865: note = Blechnum cartilagineum
WPCVGGSRAQPSVSAGENHVMGNASSTDYEHIYRNANNISRMVATPVCSEVMSVARMFVRLRDLDASRLKNPEVVKELYVVADVVDMEEYNDLTLPGSERIYLICRVFTWRRNQPPPTTVRIRTPWLNLSSCSKLEICPLRHDRQAQTSPAFQCFARAKHSTTSEIAPAVLFLHAAHIYTSNPDTDTSHLNVVLQAQESAQYTLMSADQTPSGEEIFWEVETYPLLPRSDLNSTILSAQEANVLVIELILSYITHATETVKQASLHLEWLNKLLNYALNDTSSASTGSLDDEALDRQLHNLSFQVQFLLNQPPTGAGLIVPRLQYYAYSNLVGTMARIAENYDKEFRQFSLFIEQNDVLGTYLLQQNKAFAEKEREMEVFHLELQQVKKDDLTRALAKLERLEVDMREMNAAMEQAERDMEADLVQYRNRQVARAVFSVIGAIAQLGLAFFTGGATAGGAVAGVANAVSQVTDSAALASLRRISETLEKLVLVTEFLVAMRDLLNAVMDIHQGPPEVPTLPEMVSEAEWAIFENEIEAVAAGMPAEVSSVLTWKTKCKNVAALGREMITLATIIVDLQHDIKVHGLMREMAQNHAQRLKALQPVDLKNYQEMATELDMRTTRMLLGLLEVLSLQNAALRYQYLLPPSPVTIESTSLTMSTAWTLLLQHESASVISLADLGFATDQEVAYIVKGIPVGLLLDGEDWDFPISVRDIAEGAAFPADWSRVRISHVEMKFVKPGAAPADEEETVHQPTTNTGKVHMLLRGEQLFADRKRGESLKYEAAVSMEYQYAYRLDTGETTQSNRPSQEFGDKLFMQMTPFTRWKLRLPTAANENRGLAFPTASAENATTQITISFHVSAIRTIF

SEQ ID NO: 812 - protein, 842 aa, Blechnum sp.
  source 1..842: note = Blechnum cartilagineum
SVFCRYQIHLLCVELRFGSCLLAGSIQHLSMGNSIAAAEARNYEEIYKDANHIGTKSLITAVCSEVMTVCRMYVLLDDLDVKVLERAEEVKVLYVVADVVELRGDAVQLPPSVQLILSCRVLLFSSGNGWPQVAILQGPLVHYNGNYSPVTGNWSATPLLEQDTYRFFLHGQQLLILSGTSGRSSGDVLSEDGKKLQLQSSTAPILPPRWVMEDPHILSGLEASVITSELIVGHMTHAVDLVAEVKLHVEWLLLLLRHALNETMTNAEANHLLRSLFFRVQSLVRMATAAQNNTLVVPRLQHHAYSEYINRLAELARSYDTDFKALTLFIQQNEILGSYLLEQNKAFAEKERDMEVVYTTLNDIKMSELIQALGQLERLGEEMGKMSAEMEQAREDMEEGLKIYRNKQVARAAFSLLNAIAQIGLAIFTAGATTGLAASAVANAGQAITQATEAVQQLRRIFETIEKMLLLAEVLVAMRDLITAMNDGGELGTLPEWPEMPTTAEWEIFENEIEAVAAGMPEEVSETLVWKAKCKNVAAIGREMVTQAMLVSQLEYDIKVHSLLQEVAQNQAARLEAIQPTDLIDYQEMAAQLDMRTSRILLSLLQVLALQNGALTYSYLMPRTSLSARSVSATMSAVWGLLLHQGQATLVALGELGSPSTRSVEYVVKGIPVGLLLDGEDWDFTIPVADTLHFPSTWSRVRISHVEMKFVKTGGTAGRDEELQVHQPTTHTGEVYIVLRSELFFQDRRKGQYLKYEATVPVIYHYAYNLATSETTEDNRPDEEFARVFMRMTPFTRWKLRVSTSARENQGLAFPTAITPDATTQIAIRFYLSAIRDFDWNH

SEQ ID NO: 813 - protein, 845 aa, Blechnum sp.
  source 1..845: note = Blechnum cartilagineum
MGNASSTDYEHIYRNANNISRMVATPVCSEVMSVARMFVRLRDLDASRLKNPEVVKELYVVADVVDMEEYNDLTLPGSERIYLICRVFTWRRNQPPPTTVRIRTPWLNLSSCSKLEICPLRHDRQAQTSPAFQCFARAKHSTTSEIAPAVLFLHAAHIYTSNPDTDTSHLNVVLQAQESAQYTLMSADQTPSGEEIFWEVETYPLLPRSDLNSTILSAQEANVLVIELILSYITHATETVKQASLHLEWLNKLLNYALNDTSSASTGSLDDEALDRQLHNLSFQVQFLLNQPPTGAGLIVPRLQYYAYSNLVGTMARIAENYDKEFRQFSLFIEQNDVLGTYLLQQNKAFAEKEREMEVFHLELQQVKKDDLTRALAKLERLEVDMREMNAAMEQAERDMEADLVQYRNRQVARAVFSVIGAIAQLGLAFFTGGATAGGAVAGVANAVSQVTDSAALASLRRISETLEKLVLVTEFLVAMRDLLNAVMDIHQGPPEVPTLPEMVSEAEWAIFENEIEAVAAGMPAEVSSVLTWKTKCKNVAALGREMITLATIIVDLQHDIKVHGLMREMAQNHAQRLKALQPVDLKNYQEMATELDMRTTRMLLGLLEVLSLQNAALRYQYLLPPSPVTIESTSLTMSTAWTLLLQHESASVISLADLGFATDQEVAYIVKGIPVGLLLDGEDWDFPISVRDIAEGAAFPADWSRVRISHVEMKFVKPGAAPADEEETVHQPTTNTGKVHMLLRGEQLFADRKRGESLKYEAAVSMEYQYAYRLDTGETTQSNRPSQEFGDKLFMQMTPFTRWKLRLPTAANENRGLAFPTASAENATTQITISFHVSAIRTIF

SEQ ID NO: 814 - protein, 812 aa, Blechnum sp.
  source 1..812: note = Blechnum cartilagineum
MGNSIAAAEARNYEEIYKDANHIGTKSLITAVCSEVMTVCRMYVLLDDLDVKVLERAEEVKVLYVVADVVELRGDAVQLPPSVQLILSCRVLLFSSGNGWPQVAILQGPLVHYNGNYSPVTGNWSATPLLEQDTYRFFLHGQQLLILSGTSGRSSGDVLSEDGKKLQLQSSTAPILPPRWVMEDPHILSGLEASVITSELIVGHMTHAVDLVAEVKLHVEWLLLLLRHALNETMTNAEANHLLRSLFFRVQSLVRMATAAQNNTLVVPRLQHHAYSEYINRLAELARSYDTDFKALTLFIQQNEILGSYLLEQNKAFAEKERDMEVVYTTLNDIKMSELIQALGQLERLGEEMGKMSAEMEQAREDMEEGLKIYRNKQVARAAFSLLNAIAQIGLAIFTAGATTGLAASAVANAGQAITQATEAVQQLRRIFETIEKMLLLAEVLVAMRDLITAMNDGGELGTLPEWPEMPTTAEWEIFENEIEAVAAGMPEEVSETLVWKAKCKNVAAIGREMVTQAMLVSQLEYDIKVHSLLQEVAQNQAARLEAIQPTDLIDYQEMAAQLDMRTSRILLSLLQVLALQNGALTYSYLMPRTSLSARSVSATMSAVWGLLLHQGQATLVALGELGSPSTRSVEYVVKGIPVGLLLDGEDWDFTIPVADTLHFPSTWSRVRISHVEMKFVKTGGTAGRDEELQVHQPTTHTGEVYIVLRSELFFQDRRKGQYLKYEATVPVIYHYAYNLATSETTEDNRPDEEFARVFMRMTPFTRWKLRVSTSARENQGLAFPTAITPDATTQIAIRFYLSAIRDFDWNH

SEQ ID NO: 815 - protein, 817 aa, Blechnum sp.
  source 1..817: note = Blechnum cartilagineum
MAAGKTVPMYNHDNQSATIWAEGEMVWAERETSDLLCVNWPYILLDDLGVSRISNPSAIRHVVVIADVVEIDQPLVSLPGSLSITLVCRILRVRQAAGAVLQLRHLQAEWATLSQGQSAQLHLYAQQLVGSLEVHQPVMHTIEPEIPETGLPPIGPPFPPIIASSYMIWAISPYTNASQSKPASLTLHGIVVTHSDEWHNRFKVIVPHSPPLEAFEGVDILLAIEAGLAVAETILTFQTHARERVEAARRHAQWLNQLLQELLDSGRSLKEQILGQLFRTQVLLKLPVDRSQTDAVPRLQYERYGSLINRIAREAESYITEFKKMSLVMQQLDQTARGRQLLAMMETFAANESAMEVEETIYLEDAAVLETRRKIWKRQLEKLQAEMEQANQDMNEGLTGYNDRIDANAMFAILKAVASIGLAMFTGGATVEVAVAEAAVAVSLVSGTNAGRLQNAIKTLQVLVGVIEVLVALNSYFSQGQIEQIQNARAMPQLPSEAEWSSFEDDIEAVAATMPKEASEVPTWKAKCKNMAVFCRELTSTASDLALLRSNMRVHDIRKDIAMIYMERLPQMNPAENFKDYAQLVALLDVQNSRILLRLLDMFVLQNGALGYEYLFPVTRLISGWPKVENLSTMLARSEAEAADYLLTEVGQQTNFSATYAVPEIPVGLLQNHDDWIFTIPINGSIVLSDRWSRIRIHNVDIRFRQGALQPSTVDDQLHILLEAAPTFRDRRKQDILDFKAVVPASYTFAYHLRTGETMPTPEVSDQYPLMKMTPFTQWRLRLSDQNHGLAFPTALSPHDTTVISLTLFFSRIVTDW

SEQ ID NO: 816 - protein, 507 aa, Blechnum sp.
  source 1..507: note = Blechnum Gibbum
VCRALISCIQKKIGKTRSLVVPQLQYDVYSSLINRMAQSAESYDQSLRQFKLFIEQNKILGSYLLQQNKAFADKERDMDNFYSELISQIRKVELQSTILRMDQLSLQMQTQSEDMEKAKDDMDKGLRQFQERQVANAMFATIHALASITLAFVTGGATAPGAVAAAGNAVREAGQLARALEKVVGILDGLQVVMEVVSIMKDLVTSLQDLGQLVEAPEMPDLPLQSDWFIFENSIEEVAAEMPTEVSEVTAWKTKCKNVAVLGRKMITTATYISQLQYDIMVQGMLQEISKSHGDRLASIQAADLQSYTAMVTQMDMRTTRMLVALIKVVYMQNAALMYQSLSPPTYVNAWPVTMETVWSILLQHDHAAVLGLMRLGPSFDFMRTYVVKDIPVSLRRDGEDWEFNIPVKDYTSFPSTWSRVRIHHLEMKFVTEGVNGAAHVHQPITDTGSIYVLLQGSRIFHDRNEGEPIDYEANLPSQEFTKTFMRMTPFTNWRLRLSASAEENKG

SEQ ID NO: 817 - protein, 851 aa, Bolbitis portoricensis
  source 1..851: note = Bolbitis cladorrhizans
MASLPDYYEIYKNVNQVSRPVASRQASEVTSIHRMYFKLNLLEVALLTKADEVKELVVFADVVEMEGGKVELPASRIVTIVCRILSLKREDVELGFKFLGPVECEEGWQVGLNSEMAYIRRTSPQVRLSIYAQEVVHNSTGAILRVTHPVTVRQRVSPHRPSQYTPGTMKWQINISSAHADLSTAQRSHELRTQRFWSEPERTWLINPQEWSPFTFFLPPGLLPLAILGDSNIMLGMQSTLLIAELVLSYQTHAQATVSAAHRHLQWLTTNLVQVLDDDSLENEIREQLLALLARAELASKLPLDGSQNLIVPRLEYGQYRGLISSMAAVAEAYNSEFTAVNLFIQQNEILGSYLLQQNKAFAAREKDMEAFHGLVVERKRQELSSAQETMEELNVQLTQQTEAMDQAKEDMEAGLKKYRDAQAARAFFAVMKGVLEIGAAIFTGGATMGLAVQGGINAVKAVSSLAGKLDMVLQIMEGMEKVMEVLNAIDDLVAAVSEINKMVEAPEMPSMPSTHEWDIFENEIEEVAESMPEEVTEARTWRTKCRNVAAVCRAISTTASYIGQLQYELFVHSNQELIARRQAERLEAIQPADLTNSLEMATQLDMRTSRMLLNLLKVLTLQSGALQFHFLLPPTPFTGWVNMGMVRNALVKHEADAVAAQERLGPSTDYVRTYVMSGIPVSLLLDGDDWIFTINPLDGSTFPLSWSRVRIRYLEMKFTGGEEFHKPTTDSGKVYMLLQASRNFQDRLRREVLHYEAAVPLQYQYAYHLTTGETTVENRPSQQHHGEYMQMTPFGQWRLRLSASAFENRNLAFPTAANTDLDAATTQISITFFVTAVRAVDFRSLDDQDM

SEQ ID NO: 818 - protein, 406 aa, Bolbitis portoricensis
  source 1..406: note = Bolbitis cladorrhizans
WCSRCIFFFTGGATAGAAVAQATRAAQSVIKLTTALKKVMDIVEKLQEVMEVISAINTLWNSLQELNNIVEAPKMPELPTEADWDIYENSIEEVAASMPTEVTEVQAWKCKNVAAVSREMTKTAVYVGQLQQMILVTGLQQDIARKQAERLESMQPQDLSNYQEQATLIDMRTSRILLALLDVLILQNGALRYECLLPPEPITGWPTMDDVRRILITQEGLIVNSHTILGPSYNLEVGYNVSGIPVDLLLDNDEFQFTIPISDRVFPLSYFKVRVRYLEIRFVNDSGNHQPTTLTGEVFISLQASRSFKDREKSGGELQYEAAVPKIYQYAYNLSTGQTTFTTEPAAGTENTYMQMTPFASWRIRLSKSAHENEGLKFPTASQGDTTRIFIRFFLTIIRKVERKHQ

SEQ ID NO: 819 - protein, 895 aa, Campyloneurum angustifolium
SSARAAGVFSSMAVATLRAAEYRELYKDLNQVSEGLILEMMEFSEVMVIHRMYLRMVELDVGHLEGAEKVKHLYVFADVVEMAPASSTVRLPGSVSVSIVCRVLWLPVPVSNIPLIAFPHLKLRANFASGSGNRQFNVYRRTDGGSEVDEGLALCIHAVDIQLTGVPAFAVNSPAFYLFTDPRNLTMPAEGAITFGDPDRQVPVLMFRMYAEAQRLSGVNTGIIRISPPFSNNLRIATTVHAPPTVTLLTIDTHHPHGPGFWILRGIPDSLLKSDQLMLLMQMSLLIAELAELAHPSSETRAAVLEHVEWLSGVLIDGASSTEGTQMHQEYLELLFRAQYLLKTTSSSRSLVVPQLQYALYSPLINRMAQVAQIYDDAVNQFKLFIAQNRILGSYLLEQNKASAERERDLEVFHAELISQMTIELNSTLLKMDQLSLQMEAQTADMEQAEREMEEGLRRFRNRQVARAIFSVFRAIAAVALTVVTGGAAAPAAMNAARGAVSVAGQAARGLQSVLEILEGLQVVMEVVAIIKELVESLQDLGKLVEAPDMPEMPTDADWAIFVNEVEAVAAEMPEEVSEVVTWKTKCKNVAAVGRELMTTAAYISRLQYDIKEHSMLQEIAKRHANRLANTQAANLSSYTEMVIQMEMRTMRIIISLVKVVYVQNAALMYQYLSQPTQMRQTWPVSMETVWRMLTQREHASVLGLIRLGPSFDFERIYVVRDIPVSLLLTGEDWEFEIPVSDETTFPSSWTRVRIKHLEMKFVHDDGSAAAGHHQPITDTGKVYILLQSSRVFHDRDQAGREPLSYEAALPLDYQYAYHLDTGETTLSNLPTTQFINTYMTMTPFTNWRLRLSASALENQGLDFPTARQQGAVNQDATTQIAITFHVSAIRQISF

SEQ ID NO: 820 - protein, 764 aa, Campyloneurum angustifolium
MADYATIYANANQIYRRGVVMEGSRVMSVQRPYVLLDELDMQKLKNANVVQNLVVVADVAEIQASQLSLPGTNQVLIFCRILQVRSANRILITVAAQATQVQIGAQITQNLEVKWPDGSNFLNSWPVWRGNVLSGDYGSNNFDLQTFLTGADILLGIQATLLIMETILTFQTQLRETVEAASQYAEWLSTLVPHERFATQEIKDQLIPLVYRSQTLAKMPLDGSQTTVVPRLRYDSYRNLVNALAQTAAQYDNDFKDLERFIQTQQLLDARLLEWNKNFIAKERDMESFHSQVLYLKQDEMKSALDKVDRLGKQHQELTDEMNTAKEEMDKGIRRYQNAQIASAFFDVVAAIGAVVATFFTGGATAGVAVERATKAAQSVISLTTALKKVMEVVEKLQEVMELLSAMKTLWDSVQEINNITEAPKMPELPTEADWDIYENNVEEVAASMPTEVTEVQAWKYKCKNVAAVSREITRTAVYVGQLQHEILMNTMQQEIANKQAARLEAMQPQDLSNYQEQVTLIDMRTSRVLLALLNVLVLQNGALRYECLLPPEALTSWPTMDAVRRILITQEGLIVNSQSSLGPPRDYEVTYNLSSIPVDLILDNDDFQFTIPTSNLTFPMSYFKVRIRYLDIQFVNEIGSHRPTTLGGEVFISLQASRTFQDRDKSAHELQYEAGVPNTYQYAYNISTGITTLSTKPAVGTENVYMQMTPFSRWRLRLNRSAHENNGLKFPTATSQGDTTRIFIKFYLTVIRKIETRAGTLST

SEQ ID NO: 821 - protein, 940 aa, Campyloneurum angustifolium
SSARAAGVFSSMAVATLRAAEYRELYKDLNQVSEGLILEMMEFSEVMVIHRMYLRMVELDVGHLEGAEKVKHLYVFADVVEMAPASSTVRLPGSVSVSIVCRVLWLPVHISDIPLIAFPHLKLRVILPRGPVGVVFNQFAVFRRTDGGSEVDEGLALCIHAVDIQLTGVPAFAVNSPAFYLFTDPRNLTMPAEGAITFGDLDRQVPVLMFRMYAEAFAVNSPAFYLFTDPRNLTMPAEGAITFGDLDRQVPVLMFRMYAEAQRLSGVNTGIIRISPPFSNNLRIATTVHAPPTVTLLTIDTHHPHGPGFWILRGIPDSLLKSDQLMLLMQMSLLIAELAELAHPSSETRAAVLEHVEWLSGVLIDGASSTEGTQMHQEYLELLFRAQYLLKTTSSSRSLVVPQLQYALYSPLINRMAQVAQIYDDAVNQFKLFIAQNRILGSYLLEQNKASAERERDLEVFHAELISQMTIELNSTLLKMDQLSLQMEAQTADMEQAEREMEEGLRRFRNRQVARAIFSVFRAIAAVALTVVTGGAAAPAAMNAARGAVSVAGQAARGLQSVLEILEGLQVVMEVVAIIKELVESLQDLGKLVEAPDMPEMPTDADWAIFVNEVEAVAAEMPEEVSEVVTWKTKCKNVAAVGRELMTTAAYISRLQYDIKEHSMLQEIAKRHANRLANTQAANLSSYTEMVIQMEMRTMRIIISLVKVVYVQNAALMYQYLSQPTQMRQTWPVSMETVWRMLTQREHASVLGLIRLGPSFDFERIYVVRDIPVSLLLTGEDWEFEIPVSDETTFPSSWTRVRIKHLEMKFVHDDGSAAAGHHQPITDTGKVYILLQSSRVFHDRDQAGREPLSYEAALPLDYQYAYHLDTGETTLSNLPTTQFINTMTPFTNWRLRLSASALENQGLDFPTARQQGAVNQDATTQIAITFHVSAIRQISF

SEQ ID NO: 822 - protein, 861 aa, Campyloneurum angustifolium
MASTTKAAGDWRELYRDMHQVSDRMRFDQLEASEVMVIHRMHIKLSELDMGNLEGGEKVKQLYVFADVIEYDHGVPGASRIVRLLGSVSVVLICREWHMSCQLVANVDHYEITGRDDGLRIVLPHMTLHVVSTYSIPGRTNRIDPQSMQEFPEPCFQVYAEDLSMSFYAPAGGNSWDPALRFPGGGHFQAINNVDLVTHNAFVSFLTSAGIVTETTRHSTLRIYQWDQAGLHNMYNRIGSQPPGTRFIVPRYTEARTDVWAGGNRVIARVEVRLLPAYIVLGLRNLVPVQLLINPNILLTMQSSMLIGELVEATNPSAATREIVLKHVKWLNNLFLQVIEEKKGKDVEEYIALSFRAQYVIKRVGRIHGLVVPQLQYDAYSNLINRMAQVAESYDQAIRQFRLFIQNTENNKILGGFLLEQNQAFAEKEKDMDVFYSELIAQRQIELGNTLQKLERLSVQMQQAHADMQQAEADMEAGLRRFQNRQVAKAVFSVLGAIAAVALTIVTAGAAAPVAIGAAKNAVTVAGSAARGLIRVLEILEGLQAVMEVVRIVKDLFDALQELGQAVELPDMPDMPLQSDWLIFVNEVEAVAEGMPVEVSEVVAWKTKCKNVAVLGQEMTTSAAYISQLQYDIMMQDMLQQIARRQAERLSVLQLSDVTNFTEMVVQMDMRTTRLLVALIRVVDIQNAALMYQYLSTPTPVSTWPVSMDSVWRMLLQHEQHAIQGLMRLGPSVDIVRTYEVKGIPVSLLLDGDDYEFELSAEDRTPFPLSLSRVRIHHMEMKFVQGAHVHMPTTGTGTIYILLQGSRNFHDRNEGKIVHYEGATSLDYHYAYHLDTSETIITNMPSAEFVRTFMRMTPFTN

SEQ ID NO: 823 - protein, 424 aa, Campyloneurum angustifolium
FATGGATAPAAVSAAEAAVTAAGKGAKGLQAVVDILESLQEVMEVVSAIKELVESLEQIGQLVDAPEMPDLPSNADWEIFVNEVEAVAEQMPTEVTEVVAWKAKCKNVAALGREMSKMAAHIAQMQYQIRVQELLREIAQKHADRLSSIKPADLTNYLEMVSEMDMRTTRLLLELIRVLNIQNAALQYQYLKTPAPLNAWPVAMSTVWGLLMQQETEAIAGLLELGAASDFTREYVVKDIPVRLLQEGQDWEFEIPVSSADFPSTWCRVRISHVAMQFDAGAAATHVPTTKSGEVYMLLQSSRFFDDRAKRANEFISYQTGMGLFYQYAYRLTTGEATVTNIPSDESANTFLRLTPFTRWRLRLSSSADENIGLAFPTATSADATTQIKITFHVSAVRRRNIFIADLTSNTDQFSLNVKKSCVP

SEQ ID NO: 824 - protein, 557 aa, unidentified
  source 1..557: note = Colysis wrightii
DGEATAVCTRFVVPRLQYHMYGSLINRMVQVAQNYDQEFKQLKLFIAQNEILGSYLLQQNKAFAEREKEMSAFHSQVVSMRRSELTTAIETMNQLSLQMETESEAMNEAQENMVEAIQEYERKLLARALFSVIGAIASVALAVATGGATAPGAVAAARGAVTAAGRLAQGLQKVVDILQGLQAVMEVVVAIRDIVESLKNMGQLVEAPEMPEMPTDADWLIFVNEVEAVAEQVPTEVAEVPVWKAKCKNVAVLGQAMCTTAAYMSELQYQITVEEMLQEIAQRQADRLVGISAADLSSYTEMASQIDMRTTRILLELIKMLYIQNAAIKYEYLYDANEKLNSWPVSMETVWTMLLRQENAALLGLLNLGPSNDFTVTYAVKDIPVKLLVDGYDWNFEIAVEDFSIFPSGWSRVRIRYVELKFDQQGTDSSNIVIHQPSTNTGLVYMLLQGSRFLHDRKREEVMDYEASMGAVFAYAYDLNTGATTLSNIPSQQHANTFMQMTPFNAAWRLRLSASAMENQGLVFPTATSPDNTTQISITFYVTAIRRIDHRQEGDEE

SEQ ID NO: 825 - protein, 946 aa, Coniogramme sp.
  source 1..946: note = Coniogramme japonica
MDAATDHDYDYESDMHDEESPDLEHLARKVEMVDVADDDDESGMTIVHGESTEQLARGTRSVDFGAEDYRDLNQVSERIRLDQMEFSEVMVIHRMFIRMVELDLGHLEGAEKVKRLYVFADVVEVAEGVAWGLWRNGPLARLPGSIAIVIVCRVLWVSGVLASLGNNSMMLQLPHMKLRVLEITPSKLEIHRVDTSTEAADYPALCIHASVLECSNIRLANDRDRPPFPVRLFGFRPDLRDPNLVFSSVPRSVVDHHPINEFYVFSVIRDVFPRLPLPESVSVQLDSATRGANWYSLQTGSISQVGSVSLNRFPAEEEELEPAFSLMKTKIPAAILTDPNILLTIQTSLLIAELVEVTHPSAETGAAVAKHAEWVNELLLQAASEASGTPSHEEYLALLFRSQYLIKVRGRTRSLVVPQLQYDVYSNLINRMAQVAESFDQSLRQVKLFILQNKILGSYLLEQNRALAEKERDMDVFHSELISQSKLELENTIQKMEQLSSQMETQREGMDQAKEDMDAGLRSFQNRRVAEAMFAVISATAAIGLAFVTGGATAPAAVTAAGNAVRAAGQAANALQRVVEILEGLQEVMAMVALIKELVDSLQDIGQLVEAPEMPVLPSEAEWFIFENNVEEVAEGMPTEVSEVSSWKTRCKNVAVLGRAMVSTAAYISQLQYDIKVEAMRQEISKRHSERLLAIQPADLSSYTSLLTHMDMRNTRMLLALIRVLHIQNAALMYHSLSLPTHMNAWPVTMDTVWSMLVQHEHAAILGLLRLGPSFDFMRTYVVKDIPVSLLRDGEDCEFNISVQDHSAFPSTWSRVRIHHLEMKFVQEAHVHQPSTHTGKVYILLQGSRIFHDRNEDDVLHYEAAMPLDLHYAYRLDTGETTLSNLPSNDFIRTFIRTTPFTTWRLRLSASAEENEGLDFPTALTADATTQIAITFYVSAIRRISL

SEQ ID NO: 826 - protein, 1004 aa, Coniogramme sp.
  source 1..1004: note = Coniogramme japonica
MSGTPARLSLPALIISLSLTLTYRQVPDMDAATDHDYDYESDMHDDLVLRRLKLMHQVPDMDAATDHDYDYESDMHDEESPDLEHLARKVEMVDVADDDDESGMTIVHGESTEQLARGTRSVDFGAEDYRDLNQVSERIRLDQMEFSEVMVIHRMHIKLSELDLGHLEGAEKVKHLYVFADVVEVDEGESGELPVRFPGSMSVFILCRIWHVRAFVGLDGRNHHRVLRLPHMTLHLYRSPTLTRLHRLDPTTLQDVAEPALSIYADVVQVSLQNRPATVHSIAPFYFESSDSRVLLSRPNQQRLLQRTSLFWVRLFRNGIPNPGLPAITNEAFSVRIEDRQVLSGRGPFPTTRYSPAFPRGLLTPDIPVIFLTDSHILPALQTSVLIAELVELGRPSQATIDAVASHLRWLNKLLLKVIQETKGSTEFRQDEYLELSFRAQYLIKKMGNIRSLVVPQLQYSVYSPLINRMAQVAESYDQSLTQFRLFIQQNRILGSFLLEQNRAFAQRERDMDAFHSELISERETELENTLDKMLQLHSQMERESAEMERARERMEEALIDFQRRTILRAVFSIFAAVAGLALAFVTAGAAAPAAVAGASAAVSAVSNTVTVAAALQRIVGMLEILETVMEVVRLIKEIIDNMDLVDQLADAPEMPEMPSDHQWLIFMNDVEAVAAEIPPGVSGVSAWKARCRNVAVLGREMITTAGFISQLQYEIKVQTMLQEIAKRQAERLLAIQLPSLTNFTEMVTQMDMRTTRILVTLIKVVEVQNAALMYQYLSEPTLVNAWPVTMDTLWRILVQHEHSAIRGLIRLGPSFDINRNYVVRGIPVDLLMHGEDWQFEIPVLPNDDDDDEMDAIFPSSWSRVRIHHLEMKFVKAPHVHQPTTRTGSIYILLQGSRIFEDRNQGARVHYEAATSLDYHYAYRLDTGETTLSNFPSMEFTQTFMRMTPFTTWRLRLSASARENAGLTFPTAITADSTDQLIDPDATTEIAITFSISAIRHISF

SEQ ID NO: 827 - protein, 774 aa, Coniogramme sp.
  source 1..774: note = Coniogramme japonica
SAVPRCSIHAQQVVVSRTAPPPLLSSIGSLIIRVKRDLQRSDKSPFTQYIVRYFSYSGANTVVTAPVSPTRPPSFHWLQIVSTQRRVTVMFNEIKWNKWKADIDFQVALPLLDDLTDIHVIKGIESTLLIVELILTYRSDRMDTVAAALEHLQWINKSLVEVVQLPNSERVLELKALAARAQMLLKLPIDGSHSLKVPQLQYGQYNDVIDQMAVVAEAYNSEFRALDLFIQGNQIIGDYMLTQMKLMSTKEKDVADLESLMVLRKEQELKDAMERLQFSEEQLLKQVEEMTEAQRQMEQGVMEYVNRLTANAFFAVLGASMNIVGSLMSGSIGGVVGGIGGTISEARDIISMMDDAVASRSLLNVANGLIEVERVFEVVNAIHELYKTASSLEDLLVAEEMPIIPASEWDIMENNMEAVAATMPTDVSEALVWKAKCKNVMAVCREICTSAVTLTELQYDLFVHARKQEIAQRHADRLAEFTAADLSEYMEMASQVDTQNMRVLISLLSMLAVQNGALQYNYLMPPEPFTGWPTVESVRSALVRRKHQAVIRKASMGASHELPAHTYVLQSVPVGLLLSGEDYIFTIDPSGSDFESTWSRVRILHLEIKFTGEHQPRGGPREQAYFLLQPSSHFQDRWGNQVFHYEAVVPLIYQYAYNLNTGQTTLPNIPHEEATFLRMTPFTRWRLRLSASASQNQGISFPTATAPDSTTQITITFYVSAHVRPQTFNPLDHAEEPDIPWGEDQQQRSTEPEHEEPERGEEQEQPDIIPQEPV

SEQ ID NO: 828 - protein, 641 aa, Coniogramme sp.
  source 1..641: note = Coniogramme japonica
SAVPRCSIHAQQVVVSRTAPPPLLSSIGSLIIRVKRDLQRSDKSPFTQYIVRYFSYSGANTVVTAPVSPTRPPSFHWLQIVSTQRRVTVMFNEIKWKADIDFQVALPLLDDLTDIHVIKGIESTLLIVELILTYRSDRMDTVAAALEHLQWINKSLVEVVQLPNSERVLELKALAARAQMLLKLPIDGSHSLKVPQLQYGQYNDVIDQMAVVAEAYNSEFRALDLFIQGNQIIGDYMLTQMKLMSTKEKDVADLESLMVLRKEQELKDAMERLQFSEEQLLKQVEEMTEAQRQMEQGVMEYVNRLTANAFFAVLGASMNIVGSLMSGSIGGVVGGIGGTISEARDIISMMDDAVASRSLLNVANGLIEVERVFEVVNAIHELYKTASSLEDLLVAEEMPIIPASEWDIMENNMEAVAATMPTDVSEALVWKAKCKNVIAVCRELCSTAVSMSELQYDLFVHASMQEIAQRQAERLEEFRASDLGEVTEMATQVDMQTMRVLLSLLSTLAIQNGALQYNYLMVSEPFTGWPTVENVRSSLVRRQQQAIWDRPPSCRPTRTCWSRYRWACFSLGRITCLLSTQAALISRIPGLASASSTLRSSSLEDTCHAQLATKPISYCKRRPNSRIDGGRRSSITRQLLP

SEQ ID NO: 829 - protein, 882 aa, Davallia fejeensis
MEYSSLYGDVNQVSLRFQKTEFSEDMVVHRMHVRLEELDISVGPFNNETIEGSENVKRLYVLADVVELPSTPRNTRLPATISAIILCRVLYIPDIRFAHPTTCGLDFPFMRLRVVETSQGVGQAFALPSDDDGTGSTGAAASNIGLYILADRFIYRQATSTANFVQPLRLMTYGTSSFSTTVRPDWPEALNISPLTYWLTLSKGPPLTSSDSDLQRSDEIELLARPPPPDRIQVVFRPLAPGNMGGMALLLENSSSAFSFFPAPAPAVSADVLTDPSIILGMQLNMLIAELVLAAHNSPQVIKVVTKHVEWLNKILLQVASPSDDILALLFRVQAFMKMAKRPRFVVPRLQYHMYSSLINRMVQVAQSYDQEFRQLRLFIAQNEILGSYLLEQNKAFAEKEKEMSVFHSQVVSMRRSELNSTIEVMDRLSSQMESESEAMDKAKDNMVEAIQEYERKQLANALFAVLGAIASVALAFATGGATAPAAVAAAGAAVNAAGRLAQGLQKVVEILEGLQAVMEIVAAIRDLVESLENMGQLVAAPEMPEMPTNADWLIFVNEVEAVAEQIPTEVTEVSVWKAKCKNVAVLGQEMCTTAAHISELQYQITVDQADRLVGISIADLSSYTEMASQIDMRTTRMLLELIKMLYIQNAAIRFEYLYAASEQLNSWPVSMQSVWTMLLQQESASLLGLLDLGPSNDFTVTYVVKDIPVKLLVDGYDWHFEIPVDDFASFPAGWSRVRIRYVELTFDQQGTDQSNIVIHQPSTNTGLVYMLLQGSRFLHDRKRGELMHYEASMGLSYAYAYDLNTGATTLTNIPSEAHANTFMQTTPFTAWRLRLSASAMENQGLVFPTATSPDDTTQISITFYVTAIRRIDTRQSGDHVE

SEQ ID NO: 830 - protein, 855 aa, Davallia fejeensis
MERAIPDYSHMYRELNQVSERMKIEEMELSEVMVIHRMFIKLPDLSIAHLEGADKVKRLYVFADVVEFGSVGQTSSLPGSIMVVIMCRVLTWHWADALATPYQLDFPHMRLHAIVRSENGPLLHYHRRNSDSVHDDYPVITVSAHVIQFSGSRPTHFFGIGPLRDPSMIISSVVHQPNIVERPSRGSFCNVGLSSGSSIVTNPGRVQFRIILNWDVDRSYTVTRAPQGFSLLQRDLPDLLLIDPNILLCMQTSMLVAELVEFSHPSSDLHAAVSEHVAWLNTHLLQASTKAQGTSSHDDYLALIFLAQYLLKGMGRARSFVVPQLQYDVYRNLINQMARVAESYDQSLRQLQLFVAQNKILGRYLLEQNRAFAAKERDMEVFHSELIANKELELQNTMFKMEQLSLQMETQIADMDQAREDMDAGLRRFRNRQVANAMFAVFRAIGAIALTVVTAGAAAPAAMAAAKGAVTIAGQAARGLVRVLEILDNLQAAMEVFKIIKDLVESLREVGQLVDAPDMPDMPTEADWSIFVNEIEGVAEEMPEEVSEVSAWKTSCKNVAAVGRELMTTSAYISQLQYDIKVQALLQDIANRQAERLSSIQAADLSSFTEMVTQMDMRTTRILIELIKVLDMQNAALMYQSLTPPAPMNAWPVTMETVWGMLVQHEHAAVFGLMRLGPAFDFKRTFIVKEIPVDLLLHGEDWQFEIPVNELTVFPSTWSQVRIHHLEMKFVGTHDIEGAHQPTSESGEVYILLQGSRVFHDRNKSEPLHYEAAVPLDYHYAYHLETGETTLSNSPSNDFIRTFMRMTPFTTWRLRVSASAKENQGLAFPTTTVGAGDTTQIAVTFYVSAIREISL

SEQ ID NO: 831 - protein, 867 aa, Davallia fejeensis
MELIEKERTNKMVYTSAMVDYERLYREVNQTARAVGINKVRCGEMMAIHRMFVKLDSLTVENLDQYEVVKGLVVIADVVEIEGSSELTLPGSEYVLIFCRILHVKTDKEVVLNLNWKLSHNPPPSPSPRCSFYAQEIVASPNATLLIQVKHNDKWSNDSTFTQCIGRRFSYSSTNSSISSTPPSNVSSLGNPPTSNLILVEFERMNILYNDTNWRAFIRFQVSIPSSYDLLFPNVVEGFESTLLIVEMILSYQTDNRDLVHAAQQHLHWVDKLLLEVVSFGGDAHVQTQNKALLSRAQMLLKMPLDGSQSLVVPQLEYTGYEQVIRDMANMADAYNREFQALNQFIISNQITGQYMLNQNKALAERENDIQALESLIVLRKEQELDQAMRRLELLENNVRRQANEMDAAKDRLDQAIQDASHKRFATAYFALLGATFQIVGSLNVSNVPGIVVGIGGGINDLVNAANEVNDLTQRNMLRDVANKLGNVERVVEVVNAVQDLYKNATSLEDILNAPEMPIILASEWDSMENDVVELAAFMPTEVSIEVSTWTAKCKNVMSTSREICTTAVSISQIQCDLFVHAKQLEIAQRHAERLEEMQAVDLGDFLEMAMQMDMRTTRFLINLFRKLAIQNGALQYHYLLPPRPFTSWPTIDNVRRELVLRAEMSVLAQEQLGPPIRLTRTYAVHSIPVGLLLSGDDWNFLIDPSDDSTFPSNWSQVRIRYLEMEVTGEHKPITQSGEVYLLLQASSMFQDRLRGQIFHYEAAAPLSYAYAYNLATGETTLPNQPHEEGRFLRMTPFTRWRLRLSATAPENQGLSFPTATDLASSTQISITFYVTAIVGIHNLSSTVLSLLDYNEHGEEDHEEAKV

SEQ ID NO: 832 - protein, 340 aa, Didymochlaena sp.
  source 1..340: note = Didymochlaena truncatula
MPTEADWAIFVNEIEGVAAGMPEEVSEVSAWTTKCKNVAVLGRELTTTAAYISRLQYDITEHAMLQEIAQRHANRLSTIQAADLSSYMEMVMQMEMRTTRIMVSLIKVISIQNAALMYQCLAPPKELVRQWPLRMETIWTMLMQNEHVAILGLIRLGPSFDFKRTYVVRDIPVSLLLAGEDWEFEIPVSDHTTIPSTWSRVRIQHLEMKFVDDDATGAHQPITDTGKVYILLQGSRAFHDRSQLGLLPLLYEAALPLDYHYAYRLHTGETTLSNLPSTNFMDTFMRMTPFTNWRLRLSASAEENQGLDFPTARQQGTINEAATTQIAITFHVSAIRQISF

SEQ ID NO: 833 - protein, 863 aa, Dryopteris erythrosora
MEYSDLYGDVNQVSLRFQNTEFSEVMVVHRMHVRLDELHIPLTALEGSKKVKRLYVLADVVELPSSRPSLLLDLPATISVIILCRVLYAPATLTFLNFSFLQLRLRVVETSEGVAQTFAVPSEDDGDGSNIGVYIHADRLISRQLDTTTNNRLLLVMEVVGAGSTFSSTVRPNWPDTINVSVLGWELLLSRGPALTPSDSDLQRSDEIELLANPPHFPSELHGSVRFESWNPAVNTMHLFLQFQNSSTFSFFPVPAPPHVPADVLTHPSIILGMQMNMLIAELVLAAHNSPPVVNVVTKHVEWLNKILLQVASPTDDILALLFRVQAFMKMAKQPRFVVPRLQYHMYSSLINRMVQVAQNYDQEFRQLRLFIAQNEILGSFLLEQNRAFAEKEKEMSVFYSQVVSMRRSELNSGIETMDRLSLQMGTESEAMDEAKDDMVEAIQEYERKQLANALFAVLGAIASVALAFATGGATAPGALAQGLQKVVEILEGLQAVMEIVAAIRDLVESLENMGQLVAAPEMPEMPTNADWLIFVNEVEAVAEQIPTEVTEVSVWKAKCKNVAVLGQEMCTTAAHISELQYQITVEEMLQEIAQRQADRLVGISIADLSSYTEMASQIDMRTTRMLLELIKMLYIQNAAIKYEHLFAASGQLNSWPVSMQTVWSMLLQQESAALLGLLDLGPSNDFIVPHVVKDIPVKLLVDGNDWHFEIPVEDFAIFPAGWSRVRIRYVELKFEQQGTIHQPSTNTGLVYMLLQGSRFLHDRKREEVMEYEASMGVSYAYAYDLRTGATTLTNIPSEASANTFMQMTPFTAWRLRLSASAMENQGLVFPTATSPDDTTQISITFYVTAIRRIDTRQQGDVE

SEQ ID NO: 834 - protein, 818 aa, Elaphoglossum sp.
RLLKSNRTSTCCAPTGVWELLTCWRQSILSMAKDYAEIYKGTSQLDRSVATPVCSEVMTVARMYLLLDDLDVSLLKQPEVVKTLYVFADVIEMKKRVTLPGLEAFIVCRVFLTFTTTEETRSIWPELQTGVIVCRVFLTFNTTETRSIWPDLETDGPGWVPPDPSDPRPPAEPAPVQVPVYPILTDGTILHPLTAANAVPRSTLENSNMLLAMQATLLISEVILSFMTHATDLFTEATLHVEFLNNLLVKGMEDTTSGSGEEGRHQLRTLLFRVESLLKMQAPGLLVPRLHYNSYRNLINRMADMAMSYDTEFKQLNLYIQQNEVLGTYLLEQNKALAEKEKEMEEVHSELQEYKTTELRDVLATLDRLGGQMSEMSAEMDQAQEDMEKGLIVYQNRQTARAVFSVLNAIAQIGLAFLTGGATAPLAVNAAANAAQSASKLLKVVETLERLLLTVELLVALRDLFDAINNLGSEMTGTPIKPEDMPSAAEWTIFENEIEAVAAEMPVEVSEVLAWKAKCKNMAALGRELVNQTALVSQLQYEINLHSLQREVAQNHADRLLAIQPVDLSNYQEMAIQLEMRTTRILLGLLQVLLLQNGAIHHYYLQAPTPLSSTSVTMTAVRTLLVRQEATAVISLAELGTPSDRNFTYSVKGIPTKVLLDGEDWDFAVPVTDRDVFASDWNRVRILHVELKFVTADSGEVHLPTTDTGEVYMLLRSERFFEDRKNDELLQYEATLPVQYQYAYNLKTGETTEDNRPSEAFANLFMQITPFTRWKLRLSASASENRGLAFPTAVAADATTQIDIRFFVSAIRRIDWKM

SEQ ID NO: 835 - protein, 788 aa, Elaphoglossum sp.
MAKDYAEIYKGTSQLDRSVATPVCSEVMTVARMYLLLDDLDVSLLKQPEVVKTLYVFADVIEMKKRVTLPGLEAFIVCRVFLTFTTTEETRSIWPELQTGVIVCRVFLTFNTTETRSIWPDLETDGPGWVPPDPSDPRPPAEPAPVQVPVYPILTDGTILHPLTAANAVPRSTLENSNMLLAMQATLLISEVILSFMTHATDLFTEATLHVEFLNNLLVKGMEDTTSGSGEEGRHQLRTLLFRVESLLKMQAPGLLVPRLHYNSYRNLINRMADMAMSYDTEFKQLNLYIQQNEVLGTYLLEQNKALAEKEKEMEEVHSELQEYKTTELRDVLATLDRLGGQMSEMSAEMDQAQEDMEKGLIVYQNRQTARAVFSVLNAIAQIGLAFLTGGATAPLAVNAAANAAQSASKLLKVVETLERLLLTVELLVALRDLFDAINNLGSEMTGTPIKPEDMPSAAEWTIFENEIEAVAAEMPVEVSEVLAWKAKCKNMAALGRELVNQTALVSQLQYEINLHSLQREVAQNHADRLLAIQPVDLSNYQEMAIQLEMRTTRILLGLLQVLLLQNGAIHHYYLQAPTPLSSTSVTMTAVRTLLVRQEATAVISLAELGTPSDRNFTYSVKGIPTKVLLDGEDWDFAVPVTDRDVFASDWNRVRILHVELKFVTADSGEVHLPTTDTGEVYMLLRSERFFEDRKNDELLQYEATLPVQYQYAYNLKTGETTEDNRPSEAFANLFMQITPFTRWKLRLSASASENRGLAFPTAVAADATTQIDIRFFVSAIRRIDWKM

SEQ ID NO: 836 - protein, 591 aa, Elaphoglossum sp.
DNRDIAWKHLHSWPEYSCRCSTSMPLAVKTTGTSPGNICILGLSTAAIVPESAVAVITDANILLGMQVTVLIAELVKTAHNSDIVIDAITRHVEWLNHLLVQAHSTAPSEDVVALLYRTQGVLKMPREGLVVPRLQYHMYKNLIDRMVQVARSYDQDFRQLRLFVEQNRILGSYLLEQNRAFAAKEQDMDAFHTQVIALRTTELNNTIETMDLLSIQMEAENEAMEQARADMEAGLVQYQNRQVANALFSVLTAIASIALAFATGGATAPGAVSAAGAAVTAAGQAAAGLRRVVEILEGLQVVMEVVAAIKELVQSLQEIGNLVDAPAMPDLPVMEVVATIKELVQSLQEIGNLVDAPAMPDLPSNADWDIFVNEVEAVAEQMPTEVSEVPAWKAKCKNVAALGREMSTMAAHIAELQFEIQVQEMLRDIAQKQAERLLSIQPADLTNYLEMVSQMDMRTTRMVMELVRVLRIQNAALQYEYLQTPAPLNAWPVTMETVWGLLIQQETAAILGLLQLGPPSDFRREFEVKDIPVSLLLEGQDWEFELPVMNADFPTTWCRVRIDHVEMHFDSAAAHLPTTNTGKVYMLHCQ

SEQ ID NO: 837 - protein, 1344 aa, Polystichum polyblepharum
MGDEGDVKEDEYDYEAAYKEIDDCIRKDECFGRVENCGGLWGQTMVVRSMYLRLDDIDARHVVRPETVETLLVYADVVDVESDWVDLPGTKLVFIHCRLMRLKSRGGSTTVHFKYMMATAREGSPITYLYPHQLIVAGGDQASGLILRVSYRIQVLKKQVELVRTCHLNTFKSITVQTLKTPGFTYNSDESDFEAARTRIDLFEADYSFSEDLCNKIRYLLTTSLSSLQNTLPKICVIPPVACLHLEWLTHDCVLLWLLIREQNLKNLREKKNLVITPELKNSLLITIIKLSRMGEVAFTELVREGLIDDKHKGDLKFIFQTMHNLHRILKIQRTRTIGEVANYDEVFNSVNQIKEVVATRECSEVMVIQQMYLLLDDINVGLLQNPHNVKKLVVFADVIEIRSQNLHIPSSREVIIICRILRTKRANKLTFPYLSYNSYPLSLYVSPFGLLQQDSTSKVCIYTKELIMNDPANLLRVYSTSMELPNLVEVLGDPYVLPLIVDSLQSVENIMTYLKRTTVIATIVQDHLQWLISLLNQMMFAKSGNINITGLWRQWAENLSSHIEDATQHTLSTSEVVDYAEVYKNVNADYTELYKSVNQMRRVFVGGECPEVVIVHRMYLRLDELAASLFKKPYAIKELYVYADVVELGSQNLQIPGSTKIIIICRILRVKGPHKLTFPYLSHDPNSLPLSLFVSMINLMDWTSTLGVCIYAQHLIMNNPFNPTKCSSTSFELSIPVLIQLGNPNVLPLIEGDLQSAELILTNQTSVTATVTATKDHLQWLITILNEAKDITNLSKVSFRDLLNHAQSILRKSNESSILLVPSLRYDKYSDLIKTMANAALDYDNEFKQLDLFNKQIQISGDYLWVQNKKLAEKERDVALFHLSLLEHKKKELNAAKENSSKLKEQLKSLKKELVKAQQDLDAGLKRYRDELKMKAILSVTFLVINLALVFSTFGGNINGYKEVQESIEECKSTKKILVETWKVIKTLQEVALCLGENIGNSTKRKLHDTFDMPKMPSKADWYKFENEIVEMVENLPSKMSEVFAWKAKCKNVAIVSRELITTMAYIRRLEQEIWVEDREVEIATKQAERLEKMKVVGLNNYEDMVFQLDIRTMRILTQLLRVLNLQNGALLYHYLLQPKPIVKRWMNMGEVTSALRSHKELEIEGLEQMGTPTDKESVYKVCNIPVDLLMDGQDWIFTIPTDDFLVFPRSWSHVRIKYVEIRFSPTHHIPSTTSGQVYFLLQASRMFQDRKKEQVLDYEAAVPLEYQFAYDLKSSKTTESNKPTHEYEGSFMRMTPFTQWRLRLSSSAEENQGMSFPTAKEPDSTTEISITFYLTSIREKST

SEQ ID NO: 838 - protein, 1031 aa, Cyrtomium falcatum
MCVQEVIFDTMHNLHRILKIERTRTIGEVENYDEVFNSMNQVREVVSTTECSEVMVVQQMYLLLDDLNVGLLQNPHKVKKLIVFADVIEIGSQNLHIPSSAKVTIICRILRTKRPKKLNFPYLCHNSSPLSLYVSPFGLLQQGSTSKVCIYTKELIMNDPFNPLRVYSTSMELPNLVEVLGDPYVLPLIVDSLQSIYYILTCQKSTAIIATTTQDHLQWLISLLNQMFAKSGNNIIDFWRQWAEYLSKHIEDVTQHTLITSRMVDYAQVYKNVNADYAEVYKSVNQMRRVVAMQGRECPEVVTMHRMYFLLDELNASLFKNPDAIKELYVYADVVELGSQNLQIPGSTQIIIICRILRVKGPHKLTFPYLSHDHDISPLSLFVSTVTLFDWPSTLGVCIYAQHLIMNNPFNPFTFASTCFQLSIPAELLGNSNVLPLIEADLQSAELILTYQTSVTTTITATKDHLQWLITLLTKVKDDADLNEVSFQDLLNHAQSILRKSYGSTTLLVPSLRYDKYSDLIKTMANAASAYDSEFKQLDLFNKQIQIAGDYLWVQNKKLAEKERDVTLFHSSLLEHKKKELNAANENSEKLKKQLESLKTELMEAQQDLDAGLKRYKDDLKMKSILSMVFLVINLALVFTTFGANINGYKEVQESIEGCKEIKKVLVETWKVIKTLHELTLCLFEKIGTSTKRKFHDAFDMSKLPSIADWYKFENEIVAVVENLPSKVSEVFVWKAKYKNVAVVSRELITTMAYIRRLEHEIWVEGREVEIARKQAERLEKMKVVGLKNHEEMALQLDMQTMRILTHLIRVLNLQNGALLYHYLLQPRPIVERWVNMGEVTSALRSHKELELEGLEQMGTPTDKESVYKVGNIPVDLLTTGQDWIFTIPIDDFSAFPQSWSHVRIKYVEIRFSPTHHIPCTTSGQVYFLLQASRMFKDRKKGAVLDYEAAIPLEYQFAYDLKSGKTTESNKPTHEYEGSFMRMTPFTQWRLRLSTSAEENQGLSFPTSKETDSTTEISITFYLTSIREKST

SEQ ID NO: 839 - protein, 1348 aa, Matteuccia struthiopteris
MGDKYVGDKEEEYDYEAAYKEIDDCLRKDESYGRVENYGGLWGETMVVRSMYLRLDDIDARHLVSPERVKTLLVYADVVDVESQWVDLPGTCILIVCRLMRMKARGGSTTLNFKYVMASGSDGHVFTGGLFPPQQLIVAGRGEASGQEQQLVVRYSFRIQVLRKEVDVVRTILWTPYTDITSLRTTRQTLKKPGFTYKSDESDFEEAQTRVELLASEAKGEDLSEVCTLGHDLSKSTCNKVRFLLRTSLSSLQNALPKICVIPPAACLHLEWLTHDCLVLWALIRDQSDRQELRGMQSLIHIATLMRNMGGLGAFTGLIGYKHKPDLKVIFETMHNLHRILKIERTRIIGEVANYDEVFNSMNQIREVVATSEVMVMQRMYLLLDDLNVGILQKTKNVQTLVIFADVIEIGSQNVQIPGSTKVTIICRILRSKRPKMITFPYLCHNSSPLSLYVSPFGLLQQDSTSKVCIYAKELIMNDPFNPLRVYSTSVELSNHVEVLGNPDVLPLIVKSLQSVDYILTYQKSTTIIATTTQDHLQWLISLLNQVMSAKIGNSVIDFWRQWAEDRSKYIEDVAEHTLSTSKVVDYAEVYKTVNADYAEVYRSVNQMRTVVFNTDIECSEVMIVHRMYFLLDELNASLFKSPDVVKELYVYADVVELGSQNLQIPGSTKIIIICRLLRVKGPRTITFPYLSHDHDLSPLSLFVSIVNWPSTLGVCIYAQHLIMNNPFNPTTCSSTSFQLPIPVEILSNPNVLPLIEADLQSAELILTYQTSVTETITATKDHLQWLITILNEAKDHTNINEVSFRDLLNHAQSIFRKSNGSTILLVPSLRYDKYSDLIKSMANAASAYDSEFKQLDLSNKQIQIVGDYLWVQNKKLAEKERDVARFHSSLLEDKNKELNAANENSEKLKEQLESLKIELMKAQQDLDAGLERHKDKLKMKAIQSVVFLLINLALAFTTLGVDIKAYAEVQKSLKKYKDTKKILEDTWSLINMVARSLCVCEKIETSTKIQLHDTFDMSKMPSKAHWYKFENEIVAVVENLPSEVSEVFVWKAKCKNVAVLSRELITTMAYIRQLEHEIWVEKREVEIARKQAKRLEKMKVVGLKNYEEMALQLDMRTMRILTHLLRLLSLQNGALLYHYLLQPRPIVETWMRMCEVTSALRSHKELELEGLQEMGAPTDKESVYKVGNIPVALLMTGQDWIFTIPTDDFKVFPRSWSHVRIKYVEIRFSPEHHTPSTTSGQVYFLLQASRMFQDRKKGQVLDYEAAVPLEYQFAYDLKSGRTTESNKPSHEYEGSFMRMTPFTQWRLRLSTSAEENRGLSFSTAKETDNTTEISITFYLTAIREKNT

SEQ ID NO: 840 - protein, 1082 aa, Thelypteris noveboracensis
MGENVEDNEYHYDYEAAYKEIDDLISTVVKRECSEEIMVVHCMYLRLDDVDAGHLVNPEKVKIMLVYADVVDVESEWLEFSGRFEVYIMCRMLRVKARHGSTLDFKYFTPIGASMKTLQLPAWTMNEQLHIWAQQLMGGENEQELAIRAGFWAYEENTRVQVVGELRVKPYGRECTEDESVTRTCQTLQKPGFTYRPDESDFQEAQSEVNDLLCNRPRWFKECFHLVSPEPIAISWSDELCETIEGALSSLELALSRACIIPSAAFLHLQWLVRHLAQMGSTATMSSIASANINCLESLLSRAKTLLNAITYLQAHTRIIGEVVYAEVYKNMRRAFSTRECSEVMTMQRMYFLLDDLDMGLFKNPHVVKELIVYADIVEVGSNTLWIPGSTRVIIMCRLLSLKRSQPCILNFPHMPHDDASSYLSVYVSPAMLLNQPPATLGVYIYAQELIISNPINPTTCFSTSFQSSIPVEILGDCNVLPLIQGALHTLTYQLSATANVKTTQDHIQWLIIHLAQVENKANLHESSLNDMRDLLLHAQLLLKMSSESKSVIVPSLRYEKYSKLIERMATAASDYNSQFLQVDYFIRQNQISGDYLLQQNKIFMEKERDVEYFHSLLTDCKKVEFDAAMHKMKALKELLTTQEVEMNQAKKDMEAGLKRYQDSKIADAVFSLFGAVFEVGLAASALANAGTTLRRFKDVVEKMKKLKDTLEEIVKMVKMVENICSSFDALMDVYTLDFQKPQQIGKSLMPEMPKMPSKADWEIFENELMQVAESMPSEVSEVPIWKAKCKNVAAVFRELITIVSYMKQLEFDILVEGMEGKIAAKQMERLEHMTLADLKNYEDMAMQLEMRTSRILSRLLKALNVQSGALLYHYLLRPKPITNWMDMDAVTNALLSYEELAVEGLEQLGTPTDYRREYVVADIPVALLMDGQDWTFTIPIDDYLVFPAYWSAVRIKYVEMRFDEGHHLPSTNSGQVYCLLQASRMFQDRKRGEVLDYEAAIPLDYQFAYQLETGCPTVTNKPTHEYMGTFMRMTPFTQWRLRLSASARENHGLTFSTAREANSTTQISITFYLTAIREKSL

SEQ ID NO: 841 - protein, 874 aa, Pteris cretica
MFTQDDDWCVYMYCSPGILDMAGRDHNTDVINYEEIYKAVDEVRRTVVPRSKDAVMIVEGMYVNLNSRIDDGLFTGDSSKPKEVWVVADVVALSNDVKVPTSTERLVILCRILHVDGSYARLFSASQNVILDCDYIQESEAISKSWKVRSTELQIHIYAQCLQAPSSKELMPLCVSIPAHRKYPFFIYVMWGLFGMFDSGRGRMMPALSFPRHENNFLGPLFRSREELEQLERLFVVSLCDEQIPAALLSEAAIVEAMQATLLKAELILTYQTQAHGGATAEMARQHVEWLRSQLKGCISSQQEGQVQLDAGLAALLVRAESLSKMPQRTAYNVVPSLTYKAYRDLINRLATAAKDYDNSFMQMRTLVQSSQMTDSDFETLYKALAQKEKDVDEYHQQLARLKQNELKEVSSSLDVLKCELEKQKQAMDEAEQDANDRLKEYEMKQAAKAVFEVVKAVFAMGAAVFTAGTTVGVALEGVEEAVNASGKMKQALELLEKINKLLKVMAAIQKLIDSLNHLKDVIEAPELPSMPTEADWDIFENEIMAVASQLEKAINVANWEAKCKNVAAVGKEFIKTANRMGQLQYEILVQNLQGEVARRHRERLEEIISKGRDYDKYEEIARHVEMLRSNLHIRLLHILDLQRAAVYYHFLLDQTPFTVWVDVDTVTATLIDNEAVILTNLDSLSKCSDKTITYSVEGIPVSLLESGGAWVFSIAVPGSDQSGHKGFKDLSRVRIEYMTIKFAANSAKPQTHDDDDTDDDTVLFLMQAATDFQDRRKADKKVLQYEAAVPLRYRYAYNFSTEEELVDNRPSTSGGVEDFWMRMTPFTTWRLSLPISDPYNEGLKFDDSSASTTTSIRIVFHVSAIRDESYLFR

SEQ ID NO: 842 - protein, 819 aa, Cyrtomium fortunei
KLWKSRKVLGGGGGMVVRSMYLRLDDIDARHLVSPERVENLLVFADVVDVESDWVELPGTKTVLMVCRLMRLKARGGGSTTLDCRLRLATDQVDAGGGVYPPQQLIVAGEASGLLVRCSYRIQVLEKEVDVVRTCHLSPYTDVMAGLIVTMQTLKTPGFTYNCDESDFEAAQTRVVVLEERAMPERTCNSVCFLLRTSLSSLQNALPKICVIPHPAARLHLEWVTHSCLPLWLLIRGQYLHEKKDLVITNELQAQILTYIVKLIRMGEVAFTKLVQEGLIGYKLKGDLKVIFETMHNLHRILKIERTRTIGEVANYDEVFNSMNQVREVVSTTECSELMVVQQMYLLLDDLNVRLLQNPHKVKKLVVFADVIEIDSQNLQIPSSAKVTIICRILRTKRPKKLNFPYLYHNSSPLSLYVSPFGLLQQGSISKVCIYTKELIMNDPFNPLGVYSTSVELPNLVEVLYVLPLIIDSLQSIYYILTCQKSTAIISTTTQDHLQWLISLLNQMFAKSGNNIIDFWRQWAEDLSNHIEDVTQHTLSTSEVVDYAQVYKNVNAHYAEVYKSVNQMRRIVATQGRECLEVVTMHRMYFLLDELNASLFKNPDAIKELYVYADVVELGSQNLQIPGSTKIIIICRILRVKGPHKLTFPYLSHDRDISPLSLFVSTVRLFDWPSTLGVCIYAQHLIMNNPFNPTTCASTCFQLSIPVELLGNPNVLPLIEADLQSAELILTYQTSVTTTITATKDHLQWLITLLTEVKDDANLNEVSFRDLLNHAQSILRKSNGSTTLLVPSLRYDKYSDLIKTMANAASAYDSEFKQL

SEQ ID NO: 843 - protein, 616 aa, unidentified
  source 1..616: note = Colysis wrightii
RAYSANRVRPKFPLHHLSHVFLYLVYVNLNLRIVEGLFLNRGGSKPRKVWVVADMVALSNDVMVPTSTERLVILCCILHVDGSFARLFSNSQAVAVLNQNHGEVSFYNSCKVLSTELQIHIYAQCLQAPSSKELMLLCISIPVHRGSPFALNVTWGHFGMFDSHRSRMMPVLSFQYNDAKNFVGPLFRSREELEELERLFVVLLCDEQIPAALLGKAAIVEAMQATLLKAELILTYQTQAHGGATAKMARQHVKWLRSQLKGCISSQQEGQVLDAGLAALLVRAESLSKMSEQIAYNVIPSLTVIPSLTYKAYRNLINKMATTAKDYDNSFMQMWTLVQSSQMTDSDFETLYKALTQKETDVDEYHQQLARLKQKELKEVSSRLDVLKRELNKQKQAMDEAEQDANDRLKEYEMKQAAKVVFGVLMAVFAIGAAVFTAGATVGVAMKSVEEAVNASGKLKQAFELLKNTNMLLKVMAAIQKLMDSLDHLKDVIEAPVLQSMPTEADWDIFENEIMAMASQLEKAINVANWKAKCKNVAVVGKEIIRTADCMGQLQYEVLVQDLQGGVARRHKKRLEEIVSKGRDYGKYEEIARHFEMLRSNLHIRLLHILDLQRLY

SEQ ID NO: 844 - protein, 580 aa, Blechnum occidentale
LNWVSCLSSTSVDGEVSKDLGALLFRVQALLKLPLSYEVVPSLEYTTYQMLIDNLARAAEAYNNEFNRVDLFIRQNQILGSYLVEENKALAEKEKDMEELHNTLVKRKQDELEATIKKVDLLQIQMAEQKRAMDKAKEDMDSGLKEYEEKEIAKAFFAVLSAIGGCVLAFATGGAAGGGAAEGVEKAAEAVKEAEKAVSLLVKLVDTFKKLMDVLKKVQKVVEAVLAIKDLIEKIVDITKMVNAPPMPDLPSNADWEIFVNEVESVAENMPKEVSEVATWKCKCKNLAAVCREITTTVVYMQQLEYDLLVESLQAKVAAKHAERLQEIKPADVKNYLEMASQMNMRTTRILLNLLKVFKLQRGALLYHYLLPPNPFTGRVTIDTVRNALVQNAADAIMAMQQLGPSNNFEREYVVCDIPVDLLMQGQDWTFTIPIDDYVNTFPSAWCRVRIQHVEIKFSSGHHQPSTNDGEVYFLLQASRTFQDRGHSGDLLNYEAGVPLYYQYAYSLKSGKTTLSNKPTQEDEGLYMRLTPFTQWRLRLSASAYENQGLSFLTAKATDPSENTQISITFHLTAIRTVSF

SEQ ID NO: 845 - protein, 902 aa, Lygodium flexuosum
MSTAEAELMTSTAYESISNGAAWSPTNHTDDVAADDDEEWQDDMISMSDYEKLAYGDHYADYEAIYSGVNQLARAVGIRNRVECGEVLAIHQMFVRLDTLSVGNLLRPERVQRLIVFADVVEIKGATLTLPGSALVLIACRLLRVENRDVELNLSWNLAASSTGTPAPRCSIRAQEVITTSSTMPVLGCTLLIQVMHALTWNNNSTFTQYFGHRFSYSSENSSSTAPPVNQFMSSPGVPPTSNLILVNSKTVNILINNMRWKGYIDFQIGLPPWDDLVEPRLIDGIESTLLIAEMILSFQTNARDTVRAAKEHVEWINKALLQVVDAPNSEARFRLKILLARVQMLLKLSMDGSPPGLVVPVLEYSRYERVIRELVRVAELYNSEFNQLNLFIQQNQILGDYVLQQSKVLAEREKDVQALESSIVARKQQELNSAIRRVELLEAQLQTLATEMDEARENMDKGLQAFRNRQIAMAFFTVLGAALQLGGSLRLSSIPEIVVGIGASISEAINVAQQVEDAVASNNLVDVATKLVDVEKVIEVVNAIKQLYENDAFLEDILDAPEIPVIPSSDWDIMENNIEEVAAGMPTEVSEVVTWKTKGKNVIAVCREICATAISISELHYELFVHGKQRDIAQRHIERLEQMQTANLGEYIEIATQVDMQTMRLLIILLGNLAIQNGALHYHYLLPPEPLISWPSIDSVRRHLIQQEEKALLAEEGMGVPVRLSRAYVVEDVPVKLLLDGGDWIFTIDPSETLGFPDTWYRVRIRYIEMKFTGENIPQNPNTGKVYLLLQASSMFQDRYEREVFHYEAATPHNYQFAYELDSGEVTLPNEPAEAGRHFLMTPFTRWRLRLSASAYQNQGVFFPGTHDDGASTNISITFHVTSIVGIQHRIAEEEETLVIN

SEQ ID NO: 846 - protein, 708 aa, Lygodium flexuosum
MAAKPVLEINVADDMDYAELYRDVNQVTRPVATRQCSEVMAVHRMYFRLDDLHVDNLQNSQVVKQLYVFADVVEVEGDSVELPGSGQVSIFCRVLKLKRSEAAIRLSMLEAVRCTGRQRRTALGQDVEYYWVTPQNRLDGAGPVVTVLAAQLVAPPGAAQLRLTYPLIVDARVYDSDGYHPDFFTSNGTMEWRISTPTNGSSNTNPERTCGARTVIRPGIQWRAFEEEWYPSFRVLVAEAIPPEMLDNSNVLLGMESTTLISELVMAYQREAKDTMAATLRHVEWLNHQLLAVNQDTHSNFQFHHKQQIQSLHFRVQSLLKLPNATDDAKTLIVPPLQYNVYSNLISLMTQAAQSYDNDFKNLNLFMQQNEILGSFLLEQNKAFAAKERDMESHHSQLVNLQEEQLVTAKTRVDRLHDQLERESQAMDEARADMEAGIREYRNRLVAQAFFAVIQAVAAVCLAAFTGGATAAGAVGSAKQLSEAAQALQSVVELLERIEQIVEMVNAVTDFLSALESLNQMIELPEMPELPSTADWDIFENEIVAVAEGMPTEISEVPVWKAKSLNVAALGREIITTVAYIQQLQYDLGVNGMLQRIAQQQAERLESLQIQDLDNYLEMATELDMRTSRMLMSLLKVLTLQTAALSYHYLLPPRPLIGWVRMDSVWNALVRNAYDAVIALSSLGPSTDFVRTYDVKEIVTFEWTRLDL

SEQ ID NO: 847 - protein, 896 aa, Lygodium flexuosum
MAGSAGAADAWREVYRDLNQVSDRIRLDQLEFSEVMVIHRMHIKMSELDLGHLEGAEKVERLYVFADVVELDVVPHESSSDGDVVVRLPGSKFVTFVCRVWHINYALVQISSFARITRSVVLELRHMRWHFNAITGRMHLLDPQTLQDGMDLCFCVHAEVVQIAYYPDVTFPESNDSPSFLRFLRLEIVPDQLRVTTQTDGPVWALRGSLDYFMTPDNDGLLNEVSSQPAGTSFVLNILPDNLDVQLYANLRPNSGTTLTRDPNSIVPAFSVYKEKAGELLSDPNILPAMQTSMLIGELVEVGQPPSVTTEVVRKHVEWLNNLLLQVIEAKRGEHVEDYVELSFRAQYVIKKVGRIQRLVVPQLQYSAYSNLINRLAQVAESYDQALRQFRLFIQQNKILGGFLLEQNRAFAEKEQDMDIFYSELIAQRQIELDSILQKMKHLGAQMETQTADMEQAQADMEAGGSVGIREFQNRQVARGLFAVLGAIAAIGLTLLTGGAAAPLAVSAARSAVSLAGAVAQGLQRVLDILEGLQVVMEVVELINGLISSLQELGQPVELPEMAEMPTEADWLIFVNEVEGVAEQMPTEVSEVVAWKTKCKNVAVLGREMTTLAAYISQLQYDINMQHMLQRIARKQADRLSAIELPDLRNYGELVTQMDMRTTRLLVALIKVVNIQNAALMYQYLSEPTPVYAWPVNMDSVWRMLVQHEQFAIQGLMRLGPAFDIVRTYEVKGIPVSLLLDGDDYEFEIPAQDHVTFPLSLSRVRIHHLEMKFVQGEGDQLHMPVTDTGSVYILLQGSRNFHDRSEGSILHYEAATSLDYHFAYRLDTGETTVTNLPSAEFLTTFMRMTPFTNWRLRVSASAEENKGLAFPTATSADATTHIAITFFISAIRQIAL

SEQ ID NO: 848 - protein, 817 aa, Marsilea mutica
MDYTKLYNDVNQVSIRLELMDFSETMVVHRMLVRLDELDVSSGTGLISGAEKVKNLYIFADVLELPSASKKVRLPGSDKIIIVCRTFVANAQSSSTDLPLTSGVKFNMETGSKSTSVGGAYASSTKSSSSTAKGLQLKIQNGSYKSTMRQGSLSASEASTLELDISTTSGIINVITLNTSPSGSICFVGMTANATPPSTVVDVITDANVLLGMEVSLQIAELVKTANNSEDLLTAVTAHVQWLNDLLLQAVDALGVDKAGEAATLLCRAQGFLKTKRPNLTVPRLQYSMYKNLIDRMVQAAQDYNQSFVQFKLYVAQQKALGSFLLEQNKAFAAKEKDMESFYTQVISLRTTELKNAISRMETLSDQMDEESEAMDKAREDMEAGLIEYQNKQLARAFFAVIGAIASIGLAFATGGATAPGAVSSAQTAVTAAGKAAEGLQKVVDILKGLEEVMALVAAIKELVESISNIGELVNAPEMPDMPTDADWDIFVNEVELVAEQMPTEVSEVPAWKAKSKNVAALGREMTTTATYISQLQFQITVDQMQLEVAQKQYDRLSSITIGDLTSYLEMVSQMDMRTTRILVQLINVLYIQNAALYYEYLLVPEQLSAWPVTMQTIWTLLIQQEVKAITGLTELGPSSDFTRSFIVQDIPLSLLKSGNDWEFEFPVSGADVFPIAWSRVRIDYIEVKFPSTARHAPSTSTGEVYILLQGSRFLDDRAKKDNEYISYEATTGVPYQYAYRLSNGETTVSNIPSQEYRNTFMRMTPFTSWRLRLSISAPENQGLDFPTSTSIGDKTQVEITFYVTAIRRISTRDQPI

SEQ ID NO: 849 - protein, 767 aa, Marsilea mutica
EGEESVHLCRCGGVTISVKESVRLPGSDKIIIVCRTFVANAQSSTTDLPLTSGINFKMETGFKFTGVGGMYITSTKSSSSTTKGLQVRIQNGSYTSTMRQGSLSASEASTLALDISSTSGIINVITLDTSLIGSICFVGMTNSAIAPSTAVDVITDANILLGMKVSLQIAELVKTAHNSEDLLAAVTTHIRWMNSLLVHAVEELGVANAGEAVALLCRTQGFLKTKRPNLIVPRLQYNMYKNLIDRMVQAAQDYNRSFLQFRLHVQQQKALGSFLLEQNKAFAAKEKDMESFYTQVISLRSTELGNAINRMENLSEQMADESAAMDKAREDMEAGLIQYQNRQVARAFFAVIGAIVSTCMAFATGGATAPGALASAQNAVTAAGDAAGGLQRVVDILQQLEEVMALVAAIKDLVDSIRNVGELVNAPEMPEMPSDADWDIFVNEVELVAEQMPTEVSEVPAWKAKSKNVAALGREMTTTATYISQLQFQITVDQMQLEVAQKQYDRLSSITIGDLTSYLEMVSQMDMRTTRILVQLINVLYIQNAALYYEYLLVPEQLSAWPVTMQTIWTLLIQQEVKAITGLTELGPSSDFTRSFIVQDIPLSLLKSGNDWEFEFPVSGADVFPIAWSRVRIDYIEVKFPSTARHAPSTSTGEVYILLQGSRFLDDRAKKDNEYISYEATTGVPYQYAYRLSNGETTVSNIPSQEYRNTFMRMTPFTSWRLRLSSSAPENEGLNFPTSTSTSDTTEVEITFYVTAIRRISTRDASI

SEQ ID NO: 850 - protein, 409 aa, Marsilea mutica
SKRGHGSRPDRVSKQAIGKSILCRDRRHSLYWSSIRHWWCNSTWRMALVAAIKELVESISNIGELVNAPEMPEMPTDADWDIFVNEVELVAEQMPTEVSEVPAWKAKSKNVAALGREMTTTATYISQLQFQITVDQMQLEVAQKQYDRLSSITIGDLTSYLEMVSQMDMRTTRILVQLINVLYIQNAALYYEYLLVPEQLSAWPVTMQTIWTLLIQQEVKAITGLTELGPSSDFTRSFIVQDIPLSLLKSGNDWEFEFPVSGADVFPIAWSRVRIDYIEVKFPSTARHAPSTSTGEVYILLQGSRFLDDRAKKDNEYISYEATTGVPYQYAYRLSNGETTVSNIPSQEYRNTFMRMTPFTSWRLRLSSSAPENEGLNFPTSTSTSDTTEVEITFYVTAIRRISTRDASI

SEQ ID NO: 851 - protein, 522 aa, Huperzia sp.
  source 1..522: note = Huperzia carinata
ILVFPFCVCMCARGSLLLHSGKILGSYLLQQNKAFAAREKDMEAFHGLVVARKQEELRAAQEMMNSLNAQLTHQTEAMDQAKKDMDEGLKRYRDEQVARAFFAVLKGVLEIGAAIFTGGATAGLAVKGAINAVNAVSNLAGMLDMVIKIMEGMEQVMEVLNAIDDLVTALSEINQMVEAPQMPSMPSTAEWDIFENEIEEVAESMPTEVTEARTWRTKCKNVAALCRAICTTGSYIGQVQYDLFVHSNQELIARRQAERLEAIQPANLTNYLEMATQMDMRTSRMLLGLLKVLTLQNGALKFHFLLPPKPFTGWVTMDMVRNALVQHEADALAARERLGPSTDFTWTYVVSDIPISLLLDGDDWIFTIDPADGSAFPLSWSRVRIRYLEMKFTGGEEFHKPTTNSGEVYILLQASRIFQDRLLGEVLHYEAAVPLRYQYAYALESGETTVSNRPSQQHDGEYMQMTPFCQWRLRLSASALENQGLAFPTAAADLNSSTTQVSITFWLTAIRRIDTRLLEVSQ

SEQ ID NO: 852 - protein, 824 aa, Polypodium sp.
  source 1..824: note = Polypodium musifolium
MFVRMDDLDVSSGCRSAMADLDYSKLYQDLNQISVRLEKTEFSEVMVVHRMFVRMDDLDVSSGSGLLSGAEKVKRLYVFADVVELPSKQVRLAGTDMIVVFCRIFVPEGRHYAELFLPSMNMSMVGADGEGSIRGVILSPTVLTTLSNALQFRLECGSMTSVMRLNDVSAGATLTCNVQGASACVPLKVKTTGTSPGNICVLGLSTAAVVPESVVAVITDANILLGMQVTVLIAELVKIAHNSDGVIAAVTRHVEWLNHLLVQAQAAAPSEDVVALLYRTQAFIKLRKEGLIVPRLQYHMYKDLIDRMVQVAQSYDQDFKQMKLYVEQNKILGSYLLEQNKAFAEKEKDMDASHSQVIALRTSELQSTIERMDDLSKQMEVQSKAMEKAKADMDAGLIVYQNKQVADAVFAVMEAIASIGLAFATGGATAPGAVASAGAAVSAAGKAGEGLKKVVEILEGLQAIMEVIAAIKGLVQSLQKIGQLVNAPEMPDLPSEAEWEMFVKEVEAVAAQMPTEVTQVPAWTAKCKNVAALGREMSTTAAHIAELQYEIQVQGMLQQIAKKQADRLSSIKPADLTNYFEMVSEMDMRTTRMLLELIQVLNIQNGALRYEYLQPAAPLNAWPVTMQTVWGLLVQQEAAAINGLLQLGAPSDFTREYVVGDIPVKLLLGGGDWEFELPVTDADFPLTWCRVRIQHVDMQFDAVAEHLPTTSTGEVYMLLQSSRFFEDRAQHEDEFISYEAGTGLQYQYAYRLATGEATVTNVPSEAYVNTFMLLAPFTRWRLRLSSSAPENKGLAFPTATSADATTRIKITFHVSAIRRISLAR

SEQ ID NO: 853 - protein, 902 aa, Polypodium sp.
  source 1..902: note = Polypodium punctatum
MANDTSSGIVDWRELYRDMNQASDRIRFNQLEFSEVMVIYRMHIKMSELDMGHLEGSEKVKRLYVFADVVEYDANGIARLPGSISVVFLCREWHVSYHLVARMDRNPPRYQLDLAQGVIISLPHMAWHLDVRRQSMHRLDPETLQEFLEPSFCVYADDISVAYYSLNGASWDPALQFPDTAELAKCALLIYSNSNPTPNHVLLTSNRFNGTRWAFRFEFSMYYIDNEDVAKDIALQPPGTRVIFKREGLHLVVLAMDSANRIISFDPERGDLDAYMPAFSLLRQDAKFPIELLTDPNILSAMQTSMLIGELVEVGNPSTAVTEVVHKHVKWLSKLLHQVIEEKNGKDVEDYIGLSFRAQYVIKKVGRIRGLVVPQLQYDVYSNLINRMAQVAESYDQALRQFRLFIQNNKILGGFLLEQNRAFAEKEKDMDVFYSELITQRQIELDNTLQKLKRLSLQMETQQADMEQAQADMEAGLRRFQNRQAARALFAVLGAIAAVGLAFLTGGATAPAALGAARTAVTVAGSVVSGLQRVLEVLEGLQAVMEIVVIIKDLFSALQDLTQAVDLPDMPEMPLQSDWLIFVNEVEAVAQGMPTEVSEVVAWKTKCKNVAVLGQEMTTTAAYISQLQYDIMMQDMLQQIARRQADRLSAIQLPDLTNFTEMVIQMDMRTTRILVALIKVMYIQNAALMYQYLSEPTPVSAWPVNMDTVWRMLVQHEQLAIQGLLRLGPAFDIVRTFVVKSIPVRLLLDGDDYQFEIPVEDPLTFPLSLSRVRIHHLEMKIVQGAHVHTPITATGKIYILLQGSRNFHDRNEGKIMHYEAATALDYQYAYQLDTGETTVTNLPSAEFLRTFTRMTPFTNWRLRLSASADENEGLAFPTATSADATTEIAITFHISAIRRISD

SEQ ID NO: 854 - protein, 907 aa, Polypodium sp.
  source 1..907: note = Polypodium punctatum
MASITSGAGADWRELYSEMNQVSERLRLDQLEFSEVMIIHRMHIKLSELDLGHLEGADKVKHLYVFADVVELDNAADPSTPVDVRLPGSISVVFLCRVWHVSRRLTVGVNSPQYWLPTFDGRPVRIQLPHVKWHMNTLTRSMHRIDPETLQDLSGPLLCVYADLLRTSLHPPVGHSNWDAALAFPSMTVLREVEVLPCFDHSTPRQGLLTLTSNAAPQWVNQLRAAFIFTDQDAMTEILSLPADASVILNKNRPSIILTAGQSGGYTDRNVSAPAFSVLREGAETPIDSLTDPNFLPAMQTSMLIAELVEVGRPSAAIIEVMHKHVEWLNNLLLQVIEAKKGKDDVEDYIQLSYRSQYILKNVGRIDRFVVPQLQYDTYSPLINRMAQVAESYDQALRQFRLFIQQTQQNKILGAFLLDQNRAFADKEKDMDIFYSELIAQRQIELHNTLQKMEQLSLQMETQSADMEQAQADMEAGLRRFQNERVARAVFGVLGAIAAVALAFVTGGATAGAAIGAAKTAVTLAGAAARGLQQVLEILDGLQAVMEVVGMIKELFESLQELGQAVDLPEMPEMPLESDWHIFVNEVEAVAEQMPTEVSEVVAWKTKCKNVAVLGREMITLATYISQLQYDIQMQDMLQQIARKQADRLSAIQLSIPNTGYTEMLMQMDMRTTRLLVALIRAVHIQNAALMYQYLSEPIPVSAWPVNMDAVWRILVQHEQSAIQGLLRLGPAFDIERVFVVEDIPVSLLLEGDDYEFDIPVEDNITFPLSLSRVRIHHLEMKFVASGGQKQVHMPVTDSGSVYILLQSSRNFHDRNERAVVHYEAATSLDYHYAYNLETGQIKVTNQPSAEFRKTFMRSTPFTNWRLRLSASAEENKGLAFPTATSADATTQIVVTFHISAVRQVAF

SEQ ID NO: 855 - protein, 922 aa, Polypodium sp.
  source 1..922: note = Polypodium punctatum
MHPTGHDGISNIPLEQCHDDYAEERQMKPRFETNGLELDYEKIYAGSNSIAREVGLDKVNCGEVMAIHQMFFRLDTLSQELLRRPELVKRLIVVADVVEIEGSNATLSLPGSSLVLIFCRILILKSRNLVLDLDNWNLRAASTTPLHRCSIRAQRVVIASGFSLYSSLLIQVKHKFEWSDGTHLDQYFGRPFYFTAIGINSSATITTTATSAMRSINTWPGTAPVSNFIRVNSEKFNVLVNAVPWKGVIDCQAALPSLDDLLHPDVISGFQSTLLIVETILNFQTDNPAIISLARQHAEWILDSLLQVVPLPDSTLGVPEAKTLLARAQILMKLPTDGSQHLRVPLLAYGEYQEDIERLLRNAEAYDQEYRELTRFVQLVEIIGSEFLQLSRSLAQRERDIEAFESLAVIRKQSELDQAIRRMNSLMPEIERRSFEMADAKARMEEGCLFYRMFTSYITVKCKTSKLTCLIAAGLEDYNRRQLTRAIFGILGALLQLCASLKFGGGADIAGGIATTVPAAIDLIHAVQDTSASTKLLAISQTLMDLEKIVDVVNAVNTLAESATELEDIVHAPELPLIPPYTWDILENDIEEFAALMPLEVSEVVTWKAKCRNLVAVCREICIAASFACEVQYELFVHARQQEMARRQAERLEGMQTAALSSYIELATQADMRTARLLLSLLNVLAGHQGALHYHYLMELEVFTSSWPTVDSVRTHLLQLNQRARARENALFGDGVLTVDLQHDYVLDAIPVSLLLSGEDWNFTINPERNASSFPTPWDYVRIRYVEMRFTGEHLPVSETGEIYLLLRSSANFQDRLEEQVLEYEAAVPLVYQYAYNLSTGATTLPNQPSESGKFFRMTPFTRWRLRLSASAYQNQGVSFPTLPGDPNSDSPVQITITFFVTALPQIQSRSLDMSDGDPTEE

SEQ ID NO: 856 - protein, 888 aa, Nephrolepis exaltata
MEYSDLYADVNQVSLRFQETEFSEVMVVHRMYLRLQDLDMKTQPFPSMLWGSEKVQRLYVVADVVELPSTPTTMLFPATVSVVILCRVLYVHDLSLHIGTCGIQFTLLRLRLVETKEGLVKIFPIPASASSKDTDIGLYIHTDRVIYRQNTSSDDVHILQPLQMRVWGIWADSTFSTEVRANWPTTLAVHVLILWLTASKGQRIPATESDLQRSDEFELLCPPTPDKLKVSFASPVPPGIPSPIEVDFENTFSFFRVPPADAIPTEVLTNPYIILGLQMNMLIAELVLAAHNSPRVINVVTKHVQWLNKILKPKLGLANDDILALVFRVQSFLKTANQPRSIVPRLQYHMYSKLIDHMVQVAQAYDQEFKQLKLFIVQNQILGSYLLEQNKAFASREKDMSAFHSQVVSLRRTELSTAIGRMDQLSVQMERENKEMDQARVDMMQAIKDYQKKQVANALFAVLGAIASVALAFATGGATAPGAVAAAGAAVTAAGKLAEGLQKVVEILQALEVVMEIVGAIRDLVESLQNLGKLIDAPEMPDMPSDADWRIFVNEVEAVAEQMPAEVVGSVAVWKAKCKNVAVLGQEMCTTAAHIGELTYQIKVEEMLQEIAQRQADRLEEITPADLSSYTEMLSQIDMRTTRLLLQLIRVLYIQNAAIKYEYLYDASSQLNSWPVSMDTVWSMLLQQENSALMGLLDLGPSTDFTRSVVVKDIPVGLLVDGNDWQFVISVEDSAAFPIGYSRVRIRYVELKFEQGSNEDGTVIHQPHTDSGLIYMLLQSSRFFRDRKRREILDYEASMGLAYAFAYNLTTGVPTVTNIPSQQYAHTFTSMTPFNNWRLRLSASAEENQGLTFPTATNSPDARTQIALTFHITAIRDIDTLAAADDDE

SEQ ID NO: 857 - protein, 900 aa, Nephrolepis exaltata
MATVVKAGRGTVTRDYEELFRDLNQISDRIRLDQMELSEVMVVHRMFIRLQELDLGHVEGAEKVKHLYVFADVVEVEEGGNSAVWAPLARLPGSITVVILCRVVSVAGILLMGSSTFNNAMRIQLPHMKLRAVEITTQSPAKLQMHRRDAALADEQYPALCIHASVIQCSNIRSAVPVNLQRFPVSLQFFSYMPDRESNEVVLSSASRQLVDEPVDSFNVHTLAPEYIKGVPIPEVATIDSASLSENSYSVQISRLNLSLSNSIAAEGELEPAFSLLKPKVPFTVLIDPNILLAMQTSVLIVELVELAHPSADTRDAVTKHKEWINQLLLQATSANGEGTNASLDEHRALLFRVQYLMKRIPGREDSLVIPRLQYDVYSSLINRMAQVAESYDQSLRQLKLFISQNRILGSYLLQQNQAFAEKERDMDVFHSELLSQRKLELEDTIHRMGLLGSQMETQQREMEQARADMEAGLREFRERQLARAMFSVLGAVAAVGLAFLTGGATAPAAVRAAHTAVSVTSSIRRMFETVMQVLDGIQAVMEWVVLIKELVSNIQDLNKLVEAPEMSEPVPTQADWDIFVNEIEAVAEQMPTEVSEVSTWKAKCKNVAALGREMTTMAVYISELQYEIKVQSMLQEIARSQADRLSNIQAANLRSYTEMVTQMDMRTTRMLVSLLEVLRIQNAALMYQFLSPPTLMDAWPVTMETVWRILVQHEHTAILGLMRLGPSFDFMRTYVVEGIPVDLLLDGEDWEFEIPVEDYITFPPTWSRVRIHHLEITFVQGADVHQPMTETGKVYILLQGSRIFHDRNQDDAILYEAATPLDYHYAYRLDTRETTLSNLPSHDFTRTFMRMTPFTNWRLRLSASAEENKGLRFPTATSADSTTQIAISFHVSAIRRVSL

SEQ ID NO: 858 - protein, 888 aa, Nephrolepis falcata
MEYSDLYADVNQVSLRFQQTEFSEVMVVHRMYVRLLDLDMTTEPHLQMLAGSEKVRRLYVVADVVELPATATNMRLPATASVVILCRVLYVQDVNSPYLACGLHFPLMPLRVVEDTQQGRVRVFPVVGGGSASVDMNNQIGLYIHADRVVYRQGTSTADPLQPLQLRVIGNGSTFSTEVRPDWPKTLEVSSLLMWLTLSKGQPIPAAESDLQRHDEVELLSPPSPDRLSVVFAYLAPGNLFSIAVDVEYIGAGFCYFRIPPADPVPTEVLTDPYVIIGLQMNMLIAELVLAAHNSPPVISVVTKHVEWLNKILQPKLSLPNDDILALLFRVQAFLKMAKQPRSVVPRLQYHMYSPLINRMVQVAQVYDQEFKQLKLFIVQNQILGSYLLEQNKAFASRETEMSSFHSQVVSLRRTELNNAIDRIDQLSVQMENENEAMDQAKEDMMQAIAEYEKKQLANALFAVLGAIASVALAFATAGATAPGAVAAAGAAVSAAGRLAEGLKKVVEILEGLAAVMEIVAAIRDLVESLQNLGQLVETPEMPDMPSNADWLIFVNEVEAVAEQMPAEVVGSVAVWKAKCRNVAVLGQEMCTTAAHIGELTYQIKVEEMLQEIAQRQANRLESLTPANLSSYTEMLSEIDMRTTRLLLQLIRLLHIQNAAIKYEYLYAAGEQLNSWPVSMDTVWSMLLQQENSALVGLLDLGPSNDFTRSFVIQGIPIGLLVDGNDWQFSIPVEDSPTFPIGYSRVRIRYVELRFDQGTSDEGRMIHQPSTSSGLTYMLLQSSPVFRDRRRREVLEYEASMGLAYAFAYNLTTGVPTLTNVPSPEFANTFMRMTPFNSNWRLRLSSSAMENQGLMFPTASSADDTTQITITFFISAIRGIDTRAAVEI

SEQ ID NO: 859 - protein, 872 aa, Nephrolepis falcata
MEYSDLYHDVNMLSLPLHRTELSEVMVVHRMHVKLRDLNLETAVSDKVHRLYVVADVVEVTLDTVSLPCKVSVVILCRVLHVEQSSVLFSSLLLPNMNVRVVLSNNRMQVYPMATDGSADDVALYIHADRVIRRQGAWTLVRVMHMSITGPESTFSVPHLPDPALFNRVMVNVQMDAGPSIPASESDLQRSDETELVSRVSNGVTVSASIAGSAWTMPADNPSATFTVFPNPPAQPVARGVLTNPYVIIGLQMNMLTAELVQAAHNAPLLIRAVTRHVEWLNKILVEALQVVSGNEDLLALLFRTETYLKMATESRSVVPRLQYHMYSDLIHRMVQVAQAYDDEFQRLRLFIAQNEILGSYLLEQNKALASREREMSAFHSQVVSLRRTELDNCLQRMDQLNVQMERENKAMEEAQEKMNEALEAHQRRGLARALFAVLGAIAAVALTVATGGAAAPAAVAAAGQAVTAAGTLAQGLKTVVEILEGLQALMDLVVIIRELVENLQTIGQLIDAPEMQEMPSNADWLIFVNEVEAVAAQMPEEVFGSVAVWKAKCRNVAVLGQEMCTMAAHIAELQQQIKLEELLQEIADRQADRLLGISAADLSSFTEMLTQIDMRTTRLLLQLIKLLHIQNVAINYEYLFPANGRLSSWPVTMHTVWEMLLQQESSAITGLLALGPSTDFARTFVVHDIPVGLLVDGFDWQFAIPVMDDSSAFPIGFSRVRIRHVELKFSAIDIDASATVHQPRTDNGFIYILLQSARSFSDRRVRQAMDYEASEGLAYPYAYNLTTGVPSLTNLPSQEHANTFMRMTPFTEWRLRLSSSAEENRGLTFPTATSPDDSTQISITFHITAIRAIDFRGMDDEERSKSDSSQK

SEQ ID NO: 860 - protein, 856 aa, Nephrolepis falcata
MASLTPDYYTIYKNVNQVSRPVASRQGSEVMSIHRMYFKLDMLKVELLTEADAVKELVVFADVVEIEGQKMDLPASRFVTIVCRILLVKEEDVELSFKFLEPAPYFQALDPGSQSALVWASSTQVRLSIHAQQVLCNSTRATMRVTHPVVIGNRIDLEYRCLEGQTHCEIIASVGTVSGTMNWQIEISSDHADLSAAQRSHELRSWEGQRETVWSVVEQNEWPAFTSLLDPVLIPLARLGDSNIILGMQSTLLIAELVLSYQTHAQDTVSAAHRHLQWLITNLLQVLKGNSLKEETREQLLALLARAESASKLPLDGTHTLIVPRLQYSQYRGLISSMAAVAQAYNSEFTAVNLFIQQNEILGGYLLQQNKAFAEREKDMTAFHGLVVERRKDELRAAQETMEDLNTQLAQQTEAMDQAKQDMDAGLKRYKNEQVARAFFSVLKAVLEIGAAIFTGGATAGQAVKGAVDAVNAVSSLAGKLDMVLSLMERMEKVMEVLNAINDLVTTLSEINKMVEAPEMPSMPSMYEWDIFENEMEEVAESMPEEVTEARTWKTKCRNVAAVCRAICSTASYIGQLQYDLFAHSNQELIARRQVERLEAIQPADLTDFLEMATQLDMRTSRMLLNLLKVLTVQNGALLFHFLLEPVPFTGWVNMDMVWNALVKHEADALVARERLGPSTDFVQTYVMSDIPISLLLDGDDWIFTIDPADGSTFPLSWSRVRIQYLEMKFTGGEEYHKPASNSGAVYILLQASRNFQDRLHERVLHYEAAVPLRYQYAYNLQSGETTVSNRPSQQHDGEYMQMTPFCQWRLRLSASALENQGLAFPTVAATDLASSTTQISITFYLTAVRSINMRQ

SEQ ID NO: 861 - protein, 838 aa, Osmunda regalis
MASVDYGEIYKNVNQITRPVATKECSEVMAIHRMYFQLDNLDVELLTKANTVKQLVVFVDVVEIESDNVKLPGSSQVTIVCRILHVKKNNVALNFDFLGPTKCNGRSTRGYARIMDDSPVFELSIYAQQLVGDDGAMLRVRHPVTVATIENGHDYEVREGNMEWQIWPYSSTGLSSAARSHELKTIGDHGRERTWLIIEQEWSRFIAVVPDLIPLRWLTDSNVLLGMEATLLTAELILSYQTDAQATVAAALQHVEWLNTQLLQVVEETDLEATGERLLSLLFRAQSLLKLPVDGSHTLIVPRLEYGLYRDLINRMTDVAEKYNSEFMQMNLFIQQNEILGTYLLEQNKVFAQKEKDMEVFHSSLVTLKQQELTAAMNKMDRLKTQLTEQKTAMDQAKKEMDEGLQKYKNEQVAKAFFAVIVGVLEIGLAIFTGGATAGAAVAGAAEAVEAVSEVAKTLGKVVDILKGLEKVMEVLNAIKDLTASLAEINQMVEAPQMPDMPSEADWAIFENEIEAVAESMPTEVSEVPTWKAKCKNVAAVCREITTTATYIGQLQYDLLVQSMQQQIAMRQAERLEAIQPADLTNYLELATQLDMRTCRMIVGLLKVLTLQNGALQYHFLLPPKPFTGWVSMDIVRNKLVQHDYEAVIARSQLGPSTDFTRTVVVEGIPVTLLLEGDDWNFTIPVHDSAFPSNWSRVRIRYLEMRFSSSEEVHQPTTNTGEVYILLQAARMFDDRLKGDVLHYQAAVPLQYQYAYDLNTGETTQSNLPSEEHTGEYMRMTPFTRWRLRLSASAYENQGLAFPTATALDSTTQISITFFLTAVRQIDTRLTELMDEPQ

SEQ ID NO: 862 - protein, 878 aa, Pellaea sp.
  source 1..878: note = Pellaea rotundifolia
MEYGSLYGDVNQVSLRFEKTEVSEVMVVHRMHVRLEELDMSSDKLKRLYVLADVVELPSQRQTIVIPATVSAIIMCRVLYIPYIWTVVDNCTLVLPHMRFRVVETSNIAPRTGQFFALPPSDAAVDNDVGSFGGLYIHADRFIYRQATSFTSDWVQPLGLRVRGSSTFSSTFRPDWPETLPVNNLNQTITLSLGSFLTPSDSDLQRSDEIEFLQTEPQRVQVVVDRGPGSQTGLVLLVENSPEISVFPAPSLEHVPADVLADPSIILGMQMNMLSAELVLAAHNSQQVIKAVSKHVEWLNKILLQVASPSDDILALLFRVQAFIKMAKQSRFVVPRLQYHAYSNLINRMVQVAQVYDQELRQLRLFIAQNEILGSYLLQQNKAFAEKEKDMSAFHSQVVSMRRSELSSTIEMMGRLSSQMETESEAMDEASDSMVAAIQEYERKQLARALFAVLGAIASVALAFATGGATAPGAVASAGAAVTAAGRLAEGLRRVVEILEGLQAVMEVVAAIRDLVESLENMGQLVEAPEMPEMPTNADWLIFVNEVEAVAEQVPEEVSEVPVWKAKCKNVAVLGQEMCTTAAHISELQYQIRVEEMLQEIAQRQADRLMGISAADLSSYTEMATQIDMRTTRMLLQLIKMLYIQNAAIKYEYLYPASERLNSWPVTMPTVWTMLLQQENAALLGLLDLGPSNDFTVTHVVKDIPVKLLVDGYDWHFEIPVEDSAIFPAGWSRVRIRYVELKFDKQGTDSNIVIHQPSTNTGEIYMLLQSSRFLSDRKREEVMDYEASTGLAYAYAYDLSTGATTLTNIPSEAHANTFMQMAPFTAWRLRLSASAMENQGLVFPTATSPDNTTQISITFYVTAIRRIDTRRQRADAEL

SEQ ID NO: 863 - protein, 564 aa, Pellaea sp.
  source 1..564: note = Pellaea rotundifolia
AATIYNSRGGEFKYSVHSSPMVEIVLHAGDLSQPALMAGWSVQAKPSPDAPAVLFLHSQQVLVITSNSPPISHTSVNVVLQAEGAAQYTLYSDHHQKEGDISEGLPTEIKLERSDLNSTLLAALEATVLTTELILSYMTDATETVTQATLYLEWLNNQLLYAQNGTTDASVSLDETVDRQFHNLMFQVQCLLNKPLVATGLLVPRLQYCTYSNLVNTMARIAENYNKEFRQLTLFIQQNEILGTYLLQQNKALAEREKEMEVFHSELQQVKKDDLMRSLVKLERLEVDMKNMSAEMEQAERDMEAGIIRYRNRQVARAVFSVLGGAIAQLASAFFTGGATAGPAVAGAANAVNQVTEVVTSLQRVVETLEKLVLVTEFLVAMRDLMNAVNDIHGGVPEVPALPDMPSDAEWAIFENEIEAVAAGMPEDVSEALTWKAKCKNVAALGREMVTLATVIGQLQYEIKVHELLQEIARNHSERLEAIQPADLKNYQEIATELDMRTIRMLLGLLEVLSLQNAALHYQYLLPPSPVTTANTNISMSTVWALLLQHEAVAVIRLADLGFA

SEQ ID NO: 864 - protein, 895 aa, Pellaea sp.
  source 1..895: note = Pellaea rotundifolia
MAAGSVGVDYRELYKDLEQISERVRMEQMEFSEVMVIHRMFINLRDLDLGHLEGAERVKRLYVLADVVEAQQSHEGANSLLTPTARFPGSISVVILCRVLWLREVSYGARITAFNVMWLQLPHTRLHAVERSATSIRMYRHGEDEDDDAYPALCIHASIVEYSKIERGHAVPQPSPSTYILRCFALRPSPNSSTNLVFSSQSRSLVDAPVREYFVYPEARNVFPSTFPTSAIIDPASLFRDWYTFRLASVTLNLSAADVSKDQLEPAISLLKDNIPAAILTDANILLTLQISVLIAELVQLAHPSKDTVEAIAKHVEWLNKLLLQATSNSTGMSSHDDYLALLFRVQCLMKTRRRARSLVVPQLQYNVYSNLINRMAQVAQSYDQALQNLKLFIVQNRILGSYLLEQNKAFAERERDMEVFHSEIIAQRMLELKNTILKMDHLSVQMETQREEMDRAREDMEAGLREFQNREVARAMFAVIGAIAMIGLAFVTGGAAAPGAVAAAGNAVTAAGQAARALQRVVEILEGLQAVMEVVVLIKDLVESLQNINQLVDAPEMPEMPSQADWSIFINEIEGVAEEMPVEVSEVSAWKTRCKNVAVLGQEMTTTAAYISQLQYDIKVNSMLQDISRGHADRLSTLRPADLSNYLEMVTQMDMRNTRMLVSLIKVVDMQNAALMYQYLSSPTPLNAWPVTMETVWSMLVQHEHGAVLGLMSLGPAFDFTRTYVVKDIPVSLLLQGEDWEFEIPVQDFVTFPSTWSRVRIHHLEMKFVKDSAHQPTTATGSVYMLLQGSRIFHDRRNHVIRSTDTILHYEAAVSLDYHYAYRLDTGDTTLSNLPSHDFLTTFMRMTPFTNWRLRLSASAEENKELDFPTATSADATTQIAITFHISAIRQTSL

SEQ ID NO: 865 - protein, 544 aa, Pellaea sp.
  source 1..544: note = Pellaea rotundifolia
MVEIVLHAGDLSQPALMAGWSVQAKPSPDAPAVLFLHSQQVLVITSNSPPISHTSVNVVLQAEGAAQYTLYSDHHQKEGDISEGLPTEIKLERSDLNSTLLAALEATVLTTELILSYMTDATETVTQATLYLEWLNNQLLYAQNGTTDASVSLDETVDRQFHNLMFQVQCLLNKPLVATGLLVPRLQYCTYSNLVNTMARIAENYNKEFRQLTLFIQQNEILGTYLLQQNKALAEREKEMEVFHSELQQVKKDDLMRSLVKLERLEVDMKNMSAEMEQAERDMEAGIIRYRNRQVARAVFSVLGGAIAQLASAFFTGGATAGPAVAGAANAVNQVTEVVTSLQRVVETLEKLVLVTEFLVAMRDLMNAVNDIHGGVPEVPALPDMPSDAEWAIFENEIEAVAAGMPEDVSEALTWKAKCKNVAALGREMVTLATVIGQLQYEIKVHELLQEIARNHSERLEAIQPADLKNYQEIATELDMRTIRMLLGLLEVLSLQNAALHYQYLLPPSPVTTANTNISMSTVWALLLQHEAVAVIRLADLGFA

SEQ ID NO: 866 - protein, 866 aa, Pteris cretica
MADVDYSVLYKDLNQISIRLEKMDFSEVMAVHRMFVRMDDLDVSSGTSGGLLVGAEKVKRLYVFADVVELPSKQVRLPGSDMIVILCRIFVQNGRHSTELFLPSMNVSMGAAGNGSIRGANLSTTIMSSSSNVLQFKLQSGTMTSAVRLKDVDAAAALTCDVQAVSASMPLTVMATGTSPGNIWVLGMTTAVVVPKSAVAVITEANILLGMQVTVLIAELVKTAYNSDAVIAAVTRHVEWLNHLLVQAHAAAPKLGMQVTVLIAELVKTAYNSDAVIAAVTRHVEWLNHLLVQAHAAAPNEDVVTLLYRTQAFLKLQREGLVVPRLQYHMYKNLIDRMVQVAQSYDQDFKQLKLYVEQNKILGSYLLEQNKAFAAKEKDMDAFHTQIITLRTTELNNTIERMDQLSKQMDEENEAMEQAKADMDAGLIEYQNKQVANALFAVLGAIASIGLAFATGGATAPGAVSAAGAAVTAAGKAAEGLKKVVEILEGLQVVMEVVAAIKELVQSLQQIGKLVDAPEMPDLPSNADWEIFVNEVEAVAEQMPTEVKQVPTWKAKCKNVAALGREMSTMAAHIAELQYQIQVQEMLREIAQKQADRLSSIKPADLTNYLEMVSEMDMRTTRMLLELIRVLYIQNAALQYEYLQTPAPLDAWPVAMSTVWNVLIQQEMSAITGLLELGAPSDFTQEYVVKDIPVSLLQGGQDWEFELPVSGADFPSSWLRVRIHHVAMQFDGSAAHVPTTNSGEVYMLLQSSRFFDDRARRATEFISYEAGMGLYYQYAYRLATGEATVTNIPSVEYANTFMRLTPFTRWRLRLSASAHENNGLAFPTATSADATTQIKITFSVSAIRRIISTYNPHISLPSDVDR

SEQ ID NO: 867 - protein, 873 aa, Pteris cretica
MDDEMEQEGLKVFAAQSDKDYEALYASVNQIARVVGMSKVRCGEVLAVYRMFVRLDSLDVAHLLQPERVRRLIVFADIVEIDKNSVALPGSALVLINCRLLHLKNRDVQLDLPYWIVENNHNAVALPRCSVRAQQVVVSPNAPTPPPLSSNGSLIIRVKLDLKWADNSPFTQYIVRYFSYNSHEAYTDIKAPVSTSKPPSFHWLLIPPLSDRRIKTAAINDIKWQADIAFQEALPSLDDLRNPHVIKGMESTVLIAETILIYRSDLMDAVTEALQHVQWINKSILEAVRLPNSESGLQLKRLAAHVQMLLKFPVDGSHSLKVPRLQYGKYDDLINRMSVVAEAYDSEFKTLKLFILGNQIIGDYMLTQMKLLAAKEKDVAGLESLIVLRKERELKEALETIDSLEKQLLKQFNEMTEAKTQMEQGLKEYENKKSAQALFAVLGASMQIAGSLMSGNISGVIGGVGGSISAMKDAIDAMDDLAASRSLLNVASGLVEVNRVFEVVNAVSELYETATSLEDLLEAEKMPNIPSSDWDMMENEVEAVAATMPTEVSEALVWKAKCKNVIAVCRELCSTAVSMSELQYDLFVHASMQEIAQRQAERLEEFRASDLGEVTEMATQVDMQTMRVLLSLLSTLAIQNGALQYNYLMVSEPFTGWPTVENVRSSLVRRQQQAIIESSHMGPSTIMPPHAYVLESVPVGLLLSGEDYMFTIDPSCSDFEDSWSRVRILHLEIKFTGGHLPRAGPRNEAYFLLQASSQFQDRWGAQVFHYEAAAPLMYQYAYNLNTGATTLPNMPFEEDTFLRMTPFTHWRLRLSASSPRNEGITFPTALAPDSTTQITVAFTVTAHPRPYVSFSLDGKIDVEQIPEKQPEDQ

SEQ ID NO: 868 - protein, 889 aa, Phegopteris hexagonoptera
RDSVDFGEYRDLNQVSERIRLDQMEFSEVMVIHRMHIKLSELDLGHLDGSEKVKLVYIFADVVESDEEQTGALPVRLPGSISVFIMCRVWHVSAYVGNNGRNHRRVLRLPHMTLHFRNSSSALRSLYRIDPATREDVSEPALSIYADVVQAVLQNPANIPTTSISTDELYFEASGSEILYTRQVLHERVGLFVVRFSQWGIPVTPSVLAHNYSVTSLTNASLASGGGPLPTSIYSPAFSRGMLTSDIPVTFLTDSHILPAFQTSVLIAELVELGRPSQATIDAVGKHLRWLSKLLLKVIEETKGTAFRQDEYLELSFRAQCLIKKMGNIRSLVVPQLQYSVYSGLINRMAQVAESYDQSLTQFRLFIQQNRILGSFLLEQNRAFAQREKDMDAFHLELISERETELENTLEKLDQLNSQMQEESAEMERARERMESSIMEFQRRTILRAVFSIFSALAALSLSFLTAGAAAPAAVAGASAAVNAVSTAATIAVTLKRIMKMLEILETVMEVVAIIKEVISNMQLVDELANAPEMPAMPSDHEWLMFENDIEEVAEEMPPEVSGVSAWKARCKNVAVLGREMITTTTYISQLQYEIKVQRMLQQIAKRQAERLLAIQLPSLTNYTEMVTEMDMRTTRILVTLIKVVEVQNAALMYQYLSQPTPVNAWPVTMDTLWRMLVQHEHSAIRGLLRLGPSFDAGNCNYVVRRIPVYLLTHGEDWQFEIPLQLNDDDENEEDEYPAQVPFPTSWSRVRIHHLEMKFVRAPHVHYPTTKTGSIYILLQGSRIFEDRNQGARVHFEAATSLDYHYAYRLDTGETTLSNVPSIEFTQTFMRMTPFTTWRLRLSSSAIENEGLAFPTAMQSGPDSTEIHPDATTEIQITFNISAVRQISF

SEQ ID NO: 869 - protein, 896 aa, Phegopteris hexagonoptera
MIAAGAEDKLMSTCTYESVSPGSAESPAKRIDDDEAAAADEEYLQDDMSSMYAYEKLADDHDHYADYEAIYNGLNQIARAVGIRNTVECGEVLAIHQMFMRLDTLSVENLLRPERVKHLIVFADVVEIEGAALTLPGSTLVLIACRLLRVKNRDVVLNLSWNLASSSSPPRCSICAQHVITTSSTPLSGCTLLIQVMHALTWSNGSTFTQYFGRQFSYSSQNSSSTAPPPNQSLSSIGVPPSSNFILVNSKTLNILINNIRWKGYIDFQVGLPSFDDLVEPHFIDAIESTLLIAEMILTFQTNVRDAVTAAKEHVEWINMALLQVVDGPNSDARFRLKILLARVQMLLKLSLYGSTPGLVVPVLEYGVYDRVIKEMVRVAELYNNEFNQLNLFIQQNQILGNYLLQQSKVLAERERDVEALESSIVARKRQELNGSIRRVELLEQQLQALASEMDEARENMETGLQVFRDRQIAFAFFAVLGAALQLGGSLRLTSIPEIVVGIGTSISDAVNLAQQVENAVASNNLVDVASKLVEVEKVIEVVNAIKQLHDNETELDDILNAPEIPIIPSSDWDIMENNMEEVAAGMPTEVSEVVTWKTKSKNVIAVCREICRTAISVSELQYELFVHGKQQEIAQRQAERLQQIQTVELGEYIEIATQVDMQTMRLLIILLGNLAIQNGALHYHFLLAPEPLTGWPSIDSVRRHLILQEEKALLAEEGMGVPVRLTREYVVEDIPVSLLLSGNDWIFTIDPSSLSETPVFPNTWNRVRIRYIEMKFTGEHLPQSPNTGKVYLLLQASSMFQDQYAQQVFHYEAATPHSYQFAYELDTGVTTLPNLPAQEGRHFLMTPFTRWRLRLSASAYQNQGVFFPGPASASTNISITFHVTSVVGIQTFHDI

SEQ ID NO: 870 - protein, 592 aa, Polystichum sp.
  source 1..592: note = Polystichum lepidocaulon
AHPSADTRATTARHLEWLSGILLQALSKAEGTPSHKEYLALSFRAQYLMKTKGTTRRLVAPQLQYDVYSPLINRMAQIAESYDNSLRQFKLFIAQNQILGNYLLEQNRAFAAKERDMDVFHSELVSQRENELKSTLNRMGHLSTQMDIQVAEMNKAHEEMEAGLRRFQNRRVAEAMFGVLRAIGAIALSFFTGGATAGLAVRAARSAVSAAGALQRVMDTLEDMQAVMEVVFIIKELVESLQDIGTLVNAPDMPEMPSKEAWDIFENEIEGVAEEMPEEVSEVSAWKTSCKNVAVLGREMITTAVYISQLQYDIKEHTMLQEIAQRHADRLSTIKAADLSSYTEMVMQMEMRTARIMVALIKVIHMQNAALMYQCLWPPTQVTTWPSLTIETVWIMLMQHEHSALLGLMRLGPSFDFMRTYVVKDIPVSLLLNGEDWEFEIPVNDYITFPSTWSRIRIHHLEMKFAQGAHVHQPTTDTGKVYILLQGLRTFYDRNEGDTLDYEAAMPLDYHYAYRLDSTGETTLSNLPSNDFIKTFMHMTPFTNWRLRLSASAEENKGLAFPTAEEDRKTGSDATTEIAITFYISAIRRISF

SEQ ID NO: 871 - protein, 718 aa, Selaginella sp.
  source 1..718: note = Selaginella erythropus
SSIIGVAAAAAGSYHIMGNAGSINYEEIYKNANNIGRSMATPMCSEVMSVARMYLRISDLHPTRLKQPEIVKELYVFADVLRLDSFEIVLPGSDIVYILCRMLHWTIPAPALGSTVYIQTPWLKLSSATVIICPQLQQSPLEWFIKAEHSTRTDAPAPLFLHAKQVLTTSNTGSSHLNVVLQLAQEVAQTYMLSDQRDVIDVNVESGYTLSRRDLNSTLLSAMEATVLIAELILRYMTHATETVVEATLHVEWLNKLLVNALKDTSTASGSDDEAVDKQLHNLLFQLQFLLTRPLGAGVIVPRLQYSTYSNLVSTMGRIAENYDKEFKQFTLFIEQNEVLGTYLLQQNKAFAEKEREMEVFHSELQQVKKDDLTRAFAKLEQLEVDMREMSAAMEQAEKDMEAGLIRYRNAQVARAVFSVLSAIAQLASAFFTGGATTGQAVAGAANAVNQVTGAVSSLQRVVEPLEKLVLVTEFLVAMRDLVNAVNDIVQQVAPEVPALPDMPSEAEWAIFENEIEAAADEMPEEVSERLQWRAKCKNVAALGREMVTLATVIGQLQYDIKVHELLQEVAQNHAERLEAIQPVDLKNYQEMATELDMRTTRMILGLLEVLSLQNAALHYQFLLPPSPVTTASTTISMSNVWTLLLQHEAAAVISLRICDRPRGDVCCQGHTRWLAARWGGLGLSDLRQRCGRFPIWLEPCADLICRDEVCKSWYRIR

SEQ ID NO: 872 - protein, 702 aa, Selaginella sp.
  source 1..702: note = Selaginella erythropus
MGNAGSINYEEIYKNANNIGRSMATPMCSEVMSVARMYLRISDLHPTRLKQPEIVKELYVFADVLRLDSFEIVLPGSDIVYILCRMLHWTIPAPALGSTVYIQTPWLKLSSATVIICPQLQQSPLEWFIKAEHSTRTDAPAPLFLHAKQVLTTSNTGSSHLNVVLQLAQEVAQTYMLSDQRDVIDVNVESGYTLSRRDLNSTLLSAMEATVLIAELILRYMTHATETVVEATLHVEWLNKLLVNALKDTSTASGSDDEAVDKQLHNLLFQLQFLLTRPLGAGVIVPRLQYSTYSNLVSTMGRIAENYDKEFKQFTLFIEQNEVLGTYLLQQNKAFAEKEREMEVFHSELQQVKKDDLTRAFAKLEQLEVDMREMSAAMEQAEKDMEAGLIRYRNAQVARAVFSVLSAIAQLASAFFTGGATTGQAVAGAANAVNQVTGAVSSLQRVVEPLEKLVLVTEFLVAMRDLVNAVNDIVQQVAPEVPALPDMPSEAEWAIFENEIEAAADEMPEEVSERLQWRAKCKNVAALGREMVTLATVIGQLQYDIKVHELLQEVAQNHAERLEAIQPVDLKNYQEMATELDMRTTRMILGLLEVLSLQNAALHYQFLLPPSPVTTASTTISMSNVWTLLLQHEAAAVISLRICDRPRGDVCCQGHTRWLAARWGGLGLSDLRQRCGRFPIWLEPCADLICRDEVCKSWYRIR

SEQ ID NO: 873 - protein, 575 aa, Polystichum polyblepharum
CGSDQRDVIDVNVESGYTLSRRDLNSTLLSAMEATVLIAELILRYMTHATETVVEATLHVEWLNKLLVNALKDTSTASGSDDEAVDKQLHNLLFQLQFLLTRPLGAGVIVPRLQYSTYSNLVSTMGRIAENYDKEFKQFTLFIEQNEVLGTYLLQQNKAFAEKEREMEVFHSELQQVKKDDLTRAFAKLEQLEVDMREMSAAMEQAEKDMEAGLIRYRNAQVARAVFSVLSAIAQLASAFFTGGATTGQAVAGAANAVNQVTGAVSSLQRVVTEFLVAMRDLVNAVNDIVQQVAPEVPALPDMPSEAEWAIFENEIEAAADEMPEEVSERLQWRAKCKNVAALGREMVTLATVIGQLQYDIKVHELLQEVAQNHAERLEAIQPVDLKNYQEMATELDMRTTRMILGLLEVLSLQNAALHYQFLLPPSPVTTARWTLLLQHEAAAVISLRICDRPRGDVCCQGHTRWLAARWGGLGDGEDWDFPISVRDAEDFPSGWSRVRISYVEMKFVRAGTGSDEEVHQPTTDTGKVYMVLRGEQLFADRKRGASLKYEAATPVEYQNAYRLVTGVGSSSSCR

SEQ ID NO: 874 - protein, 575 aa, Polystichum polyblepharum; identical to SEQ ID NO: 873

SEQ ID NO: 875 - protein, 609 aa, Polystichum sp.
  source 1..609: note = Polystichum tripteron
FIFYFFFHVQTAHNSPQLIKAVTRHVEWLNKMLVQLASPNDDILALLFRAQAYMKMAKQPHPVVPRLRYSMYSGLINRMVQIAQSYDDELKQLKLFIAQNEILGSYLLQQNQAFAAKEKSMSVFHSQVVSLRRIELDNAIEKMNRLSYQMDVEREEMEQARKDMEQALDDYEKKQIANAVFAVLGAIASAALGFVTGGATVAGAVAAAATAVGAIAKLAAMLNKVMGILEIVQQVVETVAALKEVVESINNIGHLVDAPEMPEMPSNADWLIFVNEMEAAADELPAEVGERTVWRAKCKNVAVLGQEMCTTGTHIAELQYQIKVEEMLQEIAERQAERLEGISSADLSSYMEMASQIDMRTTRLLLQLIKVLHIQSAALRYEYLYPASERLNSWPVSMETVWTMLLQQESSSLLGLLQLGVPNDATRTYVVKDIPVEVLQSGRDWPFVIPVDDYADFPSGWYRVRISHVELKIDQQAAGDANDIVIHQPSTATGKLYLLLQSSRFFSDRKPREVMEYEASMGLAYAYAYNLNTGEATLTNIPSSAYADTFMQMTPFTTWRLRLSASAEENQSLVFPTANSPTSTTQVSITFHLTRIRRIESRTFVGDVE

SEQ ID NO: 876 - protein, 721 aa, Polystichum sp.
  source 1..721: note = Polystichum tripteron
MGVPNHIMQLYKDMNQVSEAMRLDQMEFSEVMVIHRMYIKLEELDLGHLEGAEKVKRLYVFADMVEVGQSVVARLPGSFMVVILCRVLWLPDEGSTPFIMLPHLMKLRAVETSEPMQVPVGGDEMFLTGLGLFRAESDEEYPSLCIHAGVIQFSLRKVWSPSQRQFSIFNPHPPPTSTPLENIVFSSPYRKPDTRPVLRFFTSTFLNQRSQITTGPEYFTLDPASRAYTTLSIVTDPPVHWPPASVFDVNTLHPTFSVLDANIPDVLLTDDKILLAMQTSMLIAELVEVAHPASEDTRATTIAKHVEWLSGILLQALSKVEGSPSHYEYLALSFRAQYLIKTRRTTRRRVVPQLQYDIYSPVINRMAQIAETYDDSLRQFKLYIAQNQILGSYLLEQNRAFGAKERDLEVFHSELISQRENELRNTLIRMDDLSRQMDKQTAEMDKAKEEMEAGLRRFHSRTVANAMFGVLGAIGSIALGIFTGGATARRSARRAVSAAQEATRAANTLREVMRILERLEVVLEVVSILKELMESLQDLSTLVEAPEMPDLPTELDWNIFDNEIEGVAAQMPSEVSEVSAWKTKCKNVAVVGREMITTAAYISQLQYDIKEHSMLQEIAQRHADRLSAIKVADLSSYTEMVLQMEMRTARIMVSLIKVIHMQNAALMYQCLWPPTEVTTWPSLTIETAWIMLMQQEQSALLGLMRLGPSVGGEGHSCKPTA

SEQ ID NO: 877 - protein, 869 aa, Polystichum sp.
  source 1..869: note = Polystichum tripteron
MMMRPGFRTDVREDYEVIYAGSNSITREVGLSKVKCGEVMAIHRMFMRLDTLSQELLQQPELVKRLIVVADVVEIEGSGGILTLPGSFSVLIFCRLLILKRKDVVLDLGSWDLRVATTTPPLPRCSIRAQRVVIASSSPLASLLIQVKHELQWSNGSRFDQYFGRPFSFNSSEISSRSFPTTTTSTTSTKLAISTWPGTTPVSNFILVSSEKFNVLVNAVPWKGVIDCQAALPSLDDLMHPDVISGIQSTLLIVETILNYQTNNPTIILAAQQHVEWIVDSLLQVVHLPNSTTDVLELKTILARAQMLQKLPTDGSVQLRVPLLDYGEYQEDIDQLLINAAAYDQEYKELTRFVQQVQILGSEFLELSKNLAEKERQIETFESLAVIRKQNELDQAMRRIKTLQREIGRRSYEMAEARITMEEGLEDYKRRQLQNAVFGLLGALLQLFASVTFGGGAIDIAGAMATTVSAAIDTINLVEDSSASSKLLPMTQNLVDIEKVIEVVNAVNALVESATELEDIIHAPELPLISSYEWDIMENNIEELAALMPSEVSEVVTWKAKCRNLVAVCREICIAASFASEVQYELFVHARQQEMARRQAESLEQMQLASDLSAYVELATQADMRTTRLLLSLLNVLASHQGALYYHYLMEPEPFTFSWPSVDNVRMYLLELNHKARARESTLFGTGVLNVDMEQDYVVDSIPASLLLSGEDWNFTINPGRNASVFPVPWDYVRIRYVEIKFTGQHQPVTQTGEIYLLLKSSANFQDRFEDQVLEYEAAVPLVYQYAYNLGTGSTTVTNDPSTKGKFFRMTPFTHWKLRLSASAYQNEGVSFPTLLNAASDSPVQITITFYVTALPQIQHFSGGPTMEV

SEQ ID NO: 878 - protein, 852 aa, Polystichum sp.
  source 1..852: note = Polystichum tripteron
MEKDNPISGLGERSFYPPTPPVDSVTQAGNDLWLSFPGADKRDVYAHIYSNVNPIGTRAVSTPEPGKVVSVARIYLRLDQVIGHGADAAAGGIIQEMYIFADVIEIEGAKLNAEWEETVLGCHQYILLCNKLLADLTGIRRLQNLMRRVPLVVRLTNRHEPHLTMFTGRLFSPGAPVPHSSVVVHCNQFYCTDNNIINPNYVGLPPIPWAPRWALQHPSLLMAMESTITTSEVILHFIANTEGVDRLVEAMVSHVQWLNLTLLQALQERGTEQSAADLHELRMLFFRTQYLLKWPPGQISILVPRLHYTRFDNLIERMANVAEVYDRDFKQLTLFVAHNQAQGTYLFEQNKALAEREQDMEIAHSALYSMKEADLRRGIQNLETLGGQMQEMNAEMDQAREDMEAGLQRYRDQQIARAVFSILGAIAAIGVAILTGGIGARSALSRSKDAVNGVQTAVQTAARLKAVLKTVEKIVELVDVIWELKELIEEVADLAGMSLETPSRADLPEVPSAAEWYIFENEIEAVAADMPTEVSEVAVWKAKCKNVAALGREMTMQCVVVHELRYDIETHRLMAEVARSHADRLMSIQTFMDLTDYQRMATEIDMRTTRITLGLCKVLSLKHAAMRYEYLLPPSPLSITSFTISTIHSLLINQEVTAVAALNDLGIPTDHTITYLVRDIPIELLLDGEPWDFNIDSMADNLDFPSHWKRVRISHLQLHFTGARLPSTDTGAIYTLLESGSTFFDRGRPQLQEAIIQYEAMVPVAYQYAYDLQTGETTLSNKPSQQFANHFMRMTPFTQWRLRLPRTALENQGLCFPSPTPTPADATTQVSISFHLTAIRSRVHEHTVLRML

SEQ ID NO: 879 - protein, 675 aa, Polystichum luctuosum
  source 1..675: note = Polystichium tsus-simense
CNPASRLFHRRRHSPYSAGASTAAHSFAAATKSTFGAGTAGLIWTVSEVKKWYPSFKIVLPEVVPLQLLANSNIVLGVEVTALVSELIMTYQRQATELVAATLQHVDWLNTQLLSAQYSSGQLQALHFRVQALLKLLVGDDDAPLVVPPLQYEVYDDLINLMTSAAESYDNAFRQLNLFMQQNEILGSFLLDQNKAFSAKERDMESHHSQLVILQEAELTATNESIKSMNNELAQQNEAMDKAKADMEAGVKQYKDRLVAEAVFGVFRAIAQVCLAIFTGGASAAGAVETARKLSETAKALQSAVTHLEKLEKIVQVINSVTAFLENLQSLNQLIELPKMPDLPTEADWDMFENEVVAVAEGMPTEVSEVPMWKAKCKNVAALGREIIRTVAYMHQLQYDLAVNRMLQNIAQRQAERLEGLQIQDVDNYTEMATELDTRTNRMIMGLLKVLSLQTAALSYHYLLPPRSLTGWVNMDTVWNTLLNNKYDAVKALSSLGAAPTDTIQTYVVRDIPVGLLLEGNDWFFDIPIDDPAFPAPWFRVRIEHVELKFDPTSVHLPTTRNGQVYILLQAARFFADRVYGVVDEVLHFQATNTVHYQYAYRLDTGETTLNNRPTISSAAHYMRMTPFTRWRLRLSASAPQNEGLAFPTATTEDATTQITINFHLTGIHRIQYHA

SEQ ID NO: 880 - protein, 851 aa, Polystichum luctuosum
  source 1..851: note = Polystichium tsus-simense
MVDYGVVYAHVNEVGRRLGTGKVKCTRVLAKQGMLVRLDELTMEGLQDPYAVEQLVVFADVIEVAGTSVNFSAPIITIVCRILVLLDDSTRLDLTLPRAWNSLSNPARFSIFAQKVVSATPEPRRKSVVLQIRWRGSDMRGAEDVLPVSTAASDLGAEDVSPVSTAVPDLETAWGSIIFVLQGVPDAFRGRVEMNVLASLEVLLDPNVIISIQSTLLIAELILSYRTDLPETVQAAVEHAQWISNTLLAVCNFKCFHPYILHLPCTLMTMTITTCMAFTLMIFQVEASLNSSEEALELRNLLARAQMLLKFPTDGSQSLIIPRLEYRGYQSLIDRMAIVAESYTSELGQFMAFITQTQILLDDLVARTKAFAEKERDVADLQSSIVLRKRTELLQAEQTMMRLNDQLNKQAKDMEQAQHDMEQGLQEYKDREVARAFIGLLVAVVEVGVSFATGGLTALPAIKSSISAAKGLARLAEMIKAVIEVMERLAEAMEVLNAVRELIDAVAASKEIFEAPEMPDMPSIAEWDIFENEIELVAESMPEEVSEARVWRAKCKNVAAVCREVTRMGVYISQLQYELFVHAQQEAIARRHAERLEQIEAANLDNYLEMAMQIDMRTTRLLLGLLKMMSIQNAALQYHYLLPKEPFTGWPTIEIVRRRLIQKESQAVHGLEAMGMTTNFTRTFNVEDIPVDLLLSGEDWNFAIPPDSNSPFPLTFSRVRIRHVEMKFANTLALPSTTSGKLYILLQGSRTFHDRRFHEILEYEAAVPNAYPYAYNLSTGETTLSNEPSEHDAGNLLFFRMTPFTNWRLRLSSSAFENEGLLFPQGSTTTIIEITFHITAIRSIDTRLEVS

SEQ ID NO: 881 - protein, 886 aa, Pteris ensiformis
MEYSSLYGDVNQVSLRFQNTEFSEVMVVHRMHVRLEELDMTGVEGIEKVKRLYVLADVVELPSRATTVFEYVRLPATISAIILCRVLYIPEVQRLSGSAFVAQCSLDFPFMRLHVVGTSEGGAGVMQAFSSDAAASSIGVYLHADRFIYRQTTSTASDRVLPLDVRVSSGSSTFSTTARPDWPENLNVSFVTCGPQFLSKGPPLTSSDSDLQRSDEIELLDRQDGTPLLHVAFNPLAPGNVGGSQGRFQPSSACSFFHVPPPDVSADVLTDPSIILGMQMNMLIAELVLAAHNSPQVMNVVTKHVQWLNKILLQVASPNDDILALLFRIQAFMKMAKEPRFVVPRLQYHMYGSLINRMVQVAQNYDQEFRQLRLFIAQNKILGSYLLEQNRAFAEREREMSAFHLQVVSMRRSELRSAIETMNTLSLQMQTESEAMNEAQENMVEAIQEYERRLLARALFSVIGAIASVALAFATGGATAPGAVAAAGGAVSAAGRLAEGLQRVVDILQGLQTVMEVVVAIRDIVESLQNMGQLLEAPEMPEMPTNADWLIFVNEVEAVAEQVPTEVAEVPVWKAKCKNVAVLGQEMCTTGAYISELQYQITVEEMLQEIAQRQADRLVGISAADLSSYTEMASQIDMRTTRILLELIKMLYIQNAAIKYEYLYDANEKLNSWPVSMETVWTMLLHQENAALLGLLNLGPANDFTVTYAVKGIPVKLLVDGYDWNFEILVEDFAIFPSGWSRVRIRYVELKFDQQGTDSSNILIHQPSTNTGLVYMLLQGSRFLHDRKRGEVMDYEASMGPVYAYAYDLHTGATTLTNIPSQEYANTFMQTTPFNAWRLRLSASAMENQGLVFPTATSADSTTQISITFYVTAIRRIDHRQEGNVE

SEQ ID NO: 882 - protein, 878 aa, Cyathea cooperi
MEYSSLYSNPSLVNPNFQATEFSEVMVVHRMHVSLSHLNINTANSLLQPTLLQGSDKVKRLFIVADVVEAPTSRVFLPASLSVVVLCRLLYVTVPPPAFDTFGPAVTLTFPFMRFFVNEAIADFFPSKDDDAGIGCYIHADRIIRRLAMPQSDLRLRLIMTAEGPSTFSRDNWPISHFRFTQETVTADEPVAMADSELQRSDEYQQKDATVQFPLAVITFNPWLPPNGISDMGRGLDTTRPPVFCYFQFRSDVPSHILSNPYIVLGMQMTMLFAELVQVAHNSPHLLKLVTKHVEWLDKLLHQVTSPNDDILGLLFRVQVFKRTSERRHFLVPMLQYHMYSNLINRMVQAGEAYDRDLRNLQFFIATNQILGNYLLQQNKAFAEKEREMSGFHSNVVEMRRDELRNALDKMDLLALQMERENQAMQEARDALDKAILEYQRRLMANAILSVVRAVVSVALAFATAGATLAGAVASAGQAVSAAGQAAASLNKVVATLQALEGVMTFVIALREVVDSLGNMNNLINAPEQPELPSDADWLIFVNEIEAVAGQMPEEVVGPVSVWQSKCKNVAVLGQEMCTTTAHIGELTHQIKVEEMLQGIAQRQADRLNAISSPQDLSSFTEMLSEIDMRSLRLLLQLIRLLYIQNPALKYEYLFTTTDYLDTWPVNMETVRNVLIQQEAQAIRGLLQLGPSNDHTLTYVVKGIPVGLLVEGHDWVFSIPVQDFDAFPEGFSRVRIRYAELKFDAADQQTEGGMIHLPSTNTGLLYLLLQCSPSFADRKQQEVLDYEATSGVAYAYAYNLHTGAPTLTNIPSPEFANTFMRMTPFNTWRVRLSASAPENQGLSFLTANSPDDTTQITITFHFSAVRRIHHDPSQGTPI

SEQ ID NO: 883 - protein, 882 aa, Onoclea sensibilis
MEYSDLYADVNQVSMRFRETEVSEVMVVHRMHVRLQDLDMNGMPTNYSTVRRLYVVADVVELPSIVSNWMRFPGSLSVVILCRVLYVRDFNSVLGSCSLNFNFMRLRIVETKLGSVNVFPVPASASEDANNIGVYIHADRVIFRQDTSSSNIVRPVQLFVLGGSTFSTEVRPDWPTSLEVISIHLWPTLSKGQPISAAESDLQRSDEFELLPSPVGPDKVSIFFPSANPAPGNVIGQVLDVENIGAAFAFFHLPPLDPVPTEVLTDPYIISGLQMNMLIAELVLAAHNSPRVIKVVTKHVEWLNKMLQPKLHAAKDDILALLFRVQSFLKMAKEPRSVVPRLQYHMYSNLINRMVQVAQAYDQEFKQLQLFIVQNQILGRYLLEQNRAFASRERDMSSLHTQVVALRRTELNNAIDKMDLLSVQMERENEAMDQAKEDMMQAIEDYERRQVANALFAVLGAIASVALAFATAGATAPGAVAAAGAAVSAAGRLAEGLKRVVEILQGLEAVMEIVAAIRHLVESLQNIGSLIDAPAMPAGMPSDADWLIFVNEVEAVAEQMPAEVVGSVAVWKAKCKNVAVLGQEMCTTGAHIGELTYQIKVEEMLKDIAERQANRLEGITAADLSSYTEMLSQIDMRTTRLMLQLIRVLHIQNAAVKYEYLYDASRQLDSWPVSMETVWRLLLQQESDAITGLLSLGPSTDFTRSFVVKDVPVGLLLDGNDWQFVIPVEDSVAFPIGFSRVRIRYVELRFEQGSNDDGAAIHQPRTDSGSIYLLLQSSPFFSDRRRSAILDYEASMGLAYAFAYNLTTGVPTLTNVPSQEYANTFMRMTPFNNWRLRLSSSAEENRGLAFPTATSPDDRTQITLTFYITAIRGIDTRVLADE

SEQ ID NO: 884 - protein, 870 aa, Onoclea sensibilis
THFLECVGYWALCWRHQFPQPTCTIMGNVMTGPSYEEIYKNANYIHRSVATPICSEVMSVSRMYLALSELDVQRLKNPEIVKELYVFADVIFWDVFPTWPGLEAVFILCRVLVVDTRHLVAPSASSDGAEAAAADASVSIRAPWLNAPSTTFLISRREQIMPPFSCSIRAKHSTTRASTAPAAFCLQTEQVIDTSFSTNSAVSDNIVLKLETREGSSADDETVDDHIRESFPEVTLSWADVNLTLLWAMEATVLVAELISTYMSSSTRTVKEATLHLKWVNQLLIHALETKDGAPDAAVERLFNTLVLQVQLLLNNPSLVAGIVVPRLQYSTYRNLISTMAHMADGYTREFQQLIMFMEQNEVLGTFLLEQNQAFAAKERDMESFHAELHKVKTNDLIQALATLEQLEVLMTEMNAEMEQAQQDMEEGLRRFRNRQVARAVFSVFRSIVAIASSFFTGGATAGAAVQSTKNAVDQVVEMKSSLERIVETLEKLLLVSDFLVAMKELINAVQDVHGVAANVPTLPDMPTEAEWTIFENEIEAVAAEMPEEVSEVLVWKTKCKNMAAIGREMVTMATVISQLQYDVRMHDLLQEISRNQAERLEAIKPVDIRNYQEMATQLEMRTTHILLGLLEVLSLQNAAIQYQYLMPPSPVIMNNTIITMSDVWTQLLQQEAAAVVALSDLGFPTDRKVTYVVEGIPVGVLLDGQDWDFSISTEDVDHFPFGWSRVRIAYVEMKFVSARLGRSTEPAGNEDQIHEPITDTGEVYMILRGEQTFADRKRGEKVKYEAVAPVKYQYAYHVETGEMTEHNRPTEEFANHFMRMTPFTRWKLRMSGSARENRGLAFPTATAMDATTQIAIHFHVTAIRAADWH

SEQ ID NO: 885 - protein, 889 aa, Onoclea sensibilis
MARSAEAADAWREVYRDLNQVSERMRLDQLEFSEVMVIHRMHIKMSELDLGHLPGAEKVERLYVFADVVECDTPPYHSWSGPDLVIRLPGSMSVTFMCRVWHINHGVSQLQSFLDAKTLVLQIGHMRWHFNQTTGSMHRLDPQTLQNSPEPCFCVYAEVVRVAFYPDVTFPEFNNSPDLQFLQLQFGSDQLRFTSQTTNQPVWAIRGSLTFSMIPDNDGLLNEVSSQPAGTSFVLNMPDNLNVQLYANLNATSGTTLSRDPDSIIPAFSVLREKAVELLTDPNILPAMQTSMLIGELVEVGHPSEATLEVVRKHVEWLNHLLLQVIEAKQGQDVQDYIELSFRAQYVIKKVGRIHRPVVPQLQYNAYSNLINRMAQVAESYDQALRQFRIFIEQNKVLGGFLLEQNRAFAEKEADMDVFYSELITQRQIELDNTLQKMEHLGSQMDTQRADMEQAQADMEAGIRRFQDEQVARGLFAVLGAIAAVGLTVLTGGAAAPIALTAARRAVTLAGAVAQGLQRVLDILEGLQAVMEVIELIKDLISSLQELGQAVELPEMPEMPLDSDWLIFVNEVEGVAEQMPTEVSEVVAWKTKCKNVAVLGREMTTLAAYISQLQYDIKMQNMLQRIARKQADRLSAIQLPDLKNYAELVTQMDMRTTRLLVALIKVVYIQNAALMYQYLSEPTPVYAWPVNMDTVWRMLVQHEQFAVQGLMRLGPAFDIVRTYVVKSIPVSLLLEGDDYEFEILAEDHITFPLSLSRVRIHHLEMKFVQGGADVHMPITDTGSIYILLQGSRSFHDRNESAIIHYEAATSLDYHFAYRLDTGETTVTNLPSAEFVQTFMRMTPFSNWRLRLSASAEENKGLAFPTATSADATSHVAVTFFISAIRQVSL

SEQ ID NO: 886 - protein, 845 aa, Onoclea sensibilis
MGNVMTGPSYEEIYKNANYIHRSVATPICSEVMSVSRMYLALSELDVQRLKNPEIVKELYVFADVIFWDVFPTWPGLEAVFILCRVLVVDTRHLVAPSASSDGAEAAAADASVSIRAPWLNAPSTTFLISRREQIMPPFSCSIRAKHSTTRASTAPAAFCLQTEQVIDTSFSTNSAVSDNIVLKLETREGSSADDETVDDHIRESFPEVTLSWADVNLTLLWAMEATVLVAELISTYMSSSTRTVKEATLHLKWVNQLLIHALETKDGAPDAAVERLFNTLVLQVQLLLNNPSLVAGIVVPRLQYSTYRNLISTMAHMADGYTREFQQLIMFMEQNEVLGTFLLEQNQAFAAKERDMESFHAELHKVKTNDLIQALATLEQLEVLMTEMNAEMEQAQQDMEEGLRRFRNRQVARAVFSVFRSIVAIASSFFTGGATAGAAVQSTKNAVDQVVEMKSSLERIVETLEKLLLVSDFLVAMKELINAVQDVHGVAANVPTLPDMPTEAEWTIFENEIEAVAAEMPEEVSEVLVWKTKCKNMAAIGREMVTMATVISQLQYDVRMHDLLQEISRNQAERLEAIKPVDIRNYQEMATQLEMRTTHILLGLLEVLSLQNAAIQYQYLMPPSPVIMNNTIITMSDVWTQLLQQEAAAVVALSDLGFPTDRKVTYVVEGIPVGVLLDGQDWDFSISTEDVDHFPFGWSRVRIAYVEMKFVSARLGRSTEPAGNEDQIHEPITDTGEVYMILRGEQTFADRKRGEKVKYEAVAPVKYQYAYHVETGEMTEHNRPTEEFANHFMRMTPFTRWKLRMSGSARENRGLAFPTATAMDATTQIAIHFHVTAIRAADWH

SEQ ID NO: 887 - protein, 885 aa, Thelypteris noveboracensis
MEYSVLYGNVNQVSLRFEKTEFSEVVVVHRMHVRLAELNVTLGDTLLQGSDRVKRLYVLADVVEVPPNFSTWMSLPGTVSVVILCRILYFPYLEDASFASGWVVHAPLLRLRVVQTSTDFAQVFAIPENDSSAAAVADIGLYIHADRIIYRDDPARNIPVIEVQVRGNSTFSPYLPGFPDTGVKLSTVQCVREFSKGQPLAPEDSDLQRSDEIELIAPSGSEQRRLTAAFGDSTVVGVSLLFDPSTSFDFLSLGPSQINVPAAILSDPNIILGMQMNMLIAELVLAAHNSPQLIKAVTRHVEWLNKMLVQLASPNDDILGLLFRVQAYKKMAKQPHPVVPQLRYRMYQDFINRMVQIAQSYDGDLKQLKLFIAQNEILGSYLLEQNKAFAAKEKSMSAFHDQVVSLRKSELVNAIDKMNRLSYQMDVEREAMDQAQKDMEQGLEEYEKRQIVNAFFAVITAISLAALGFVTGGATVAGAVAAAGQAVNAVASLAATLQKVMGILQIIQQVVETVAAIREVIELFDNMGQLVAAPEMPEMPSNADWLIFVNEVEAMAEQLPVEVDARIVWKTKSKNVAVLGQEMCTIGTHIAELQYQIKVEEMLQKIAETQAERLEGISPADLSSYMEMVSQIDMRTTRLLLQLIRVLHIQNAALKYEYLYAADEQLDSWPVTMDTVWTMLLQQESASLSGLLSLGPANDDTRTYVVKDIPVEVLLSGGDWPFVIPVDDYTVFPAGWFYVRIRHVELKFEQQAGSDQNDIVIHQPSTNTGKLYMLLQSSRFFQDRNQAGVVMDYETSTGLSYPYAYNLNTGETTHQNVPSSEYAFTYMQMTPFTTWRLRLSAAAEENEGLVFHPPPTSPTSTTQISITFHVSRIRRIEYTLAGDVE

SEQ ID NO: 888 - protein, 896 aa, Thelypteris noveboracensis
MAAADDWSEVYRDLNQVSDRIRLDQLEFSEVMVIHRMHIKMSELDLGHLEGAEKVKHLYVFADVVEYDSLDAGLPGSIVRLPGSISVVIMCRVWHVSSLLIARPDLNNPQYVRSQDGVKLQLVHMKLYLNLVTNSMHRLDPQTLQEVPEPCLCVYAHVLRVAFRPDAGDSWDPALLFPAEYVLSTLEALIYDNDTPEHLLFNNSTFSRVWASRFQAIFRFINRDGLQIGSLPPGTIVTLNRDEPSLFSNAYRVNSTSLLNWTTISDVDWLAPAFSILRQRDIPVAVLTDPNILPAMQTSMLIGELVELGHPSAATIEVVDKHVKWLSNLWLQVIEEKKGKDVEEYLELLFRAQYVIKKVGRIRGLVVPQLQYDAYSNLINRMAQVAESYDQSLRQFRLFIQQNKILGRFLLEQNQAFAEKEKDMDIFYSELITQRQIELDNTLQKMKRLGSQMETQTAYMEQAQEDMEEGIRKFQNEQVARAIFGVIGVIAAVGLAFLTGGATAPAALGAARNAVTLAGTVAQTLQKVLDILEGLQAVMEIVAVINELVSSLQDLGQLLDLPEMPEMPMESDWLIFVNEVEAVAEQMPTEVSETIAWKTKCKNVAVLGREMITSATYISQLQYDIKVQSMLQQIAKKQADRLSNIQLPDLTNYTEMITQMDMRTTRMLVALIKVVYIQNAALMYQYLSEPTPVNAWPVNMETVWRMLVQHEQLAVQGLMRLGPAYDIVRTYVVEGIPVSLLLDGDDWEFEIPAEDRITFPLSLSRVRIHHLEMKFVQGANVHMPITDTGSIYILLQGSRNFHDRNEGEIIHYEAATSLEYHYAYRLDTGETTVTNLPSAEFVKTFMRMTPFTNWRLRVSASAEENKGLAFPLATSADATTQIAITFFISAIRQISL

1.-33. (canceled)

34. A recombinant polynucleotide comprising a polynucleotide encoding a polypeptide having at least 70% sequence identity to the amino acid sequence of any one of SEQ ID NOs: 1, 3, 5, 7, 9, 11, 13, 15, 17, 19, 21, 23, 518-607, 716, 728-737, 754, 755, 756, 757, 758, 759, 760, 761, 762, 763, 764, 765, 766, 767, 768, or 769.

35. The recombinant polynucleotide of claim 34, wherein the polypeptide has at least one amino acid substitution, deletion, insertion and/or addition at the N-terminus or C-terminus compared to of any one of SEQ ID NOs: 1, 3, 5, 7, 9, 11, 13, 15, 17, 19, 21, 23, 518-607, 716, 728-737, 754, 755, 756, 757, 758, 759, 760, 761, 762, 763, 764, 765, 766, 767, 768, or 769.

36. The recombinant polynucleotide of claim 34, wherein the polypeptide is non-naturally occurring amino acid sequence.

37. The recombinant polynucleotide of claim 34, wherein the polypeptide has insecticidal activity against Corn Earworm (Helicoverpa zea).

38. The recombinant polynucleotide of claim 34, wherein the polypeptide specifically binds to a brush border membrane vesicle isolated from a Lepidoptera.

39. The recombinant polynucleotide of claim 34, wherein the polypeptide disrupts the ionic balance across a brush border membrane vesicle isolated from a Lepidoptera.

40. The recombinant polynucleotide of claim 34, wherein the polypeptide is derived from a species of fern or primitive plant.

41. The recombinant polynucleotide of claim 40, wherein the fern is in the Genus selected from Lygodium, Adiantaceae, and Polypodium.

42. The recombinant polynucleotide of claim 34, wherein the polynucleotide is a non-genomic polynucleotide.

43. The recombinant polynucleotide of claim 42, wherein the polynucleotide is a cDNA, a synthetic polynucleotide, or has codons optimized for expression in an agriculturally important crop.

44. A transgenic plant comprising the polynucleotide of claim 34.

45. A DNA construct comprising the polynucleotide of claim 34 operably linked to a heterologous regulatory element.

46. A transgenic plant or plant cell comprising the DNA construct of claim 45.

47. An agricultural composition comprising an insecticidal effective dose of a polypeptide having at least 70% sequence identity to the amino acid sequence of any one of SEQ ID NOs: 1, 3, 5, 7, 9, 11, 13, 15, 17, 19, 21, 23, 518-607, 716, 728-737, 754, 755, 756, 757, 758, 759, 760, 761, 762, 763, 764, 765, 766, 767, 768, or 769.

48. The agricultural composition of claim 47 further comprising at least one agriculturally acceptable carrier.

49. The agricultural composition of claim 47, wherein the polypeptide of claim 47 comprises a fusion protein.

50. A method for controlling an insect pest population, comprising contacting the insect pest population with a polypeptide having at least 70% sequence identity to the amino acid sequence of any one of SEQ ID NOs: 1, 3, 5, 7, 9, 11, 13, 15, 17, 19, 21, 23, 518-607, 716, 728-737, 754, 755, 756, 757, 758, 759, 760, 761, 762, 763, 764, 765, 766, 767, 768, or 769.

51. The method of claim 50, wherein the insect or insect population is resistant to at least one Bt-derived toxin.
